(19) United States
(12) Patent Application Publication
(10) Pub. No.: US 2016/0201101 A1
(43) Pub. Date: Jul. 14, 2016

(54) COMPOSITIONS AND METHODS FOR MAKING NOSCAPINE AND SYNTHESIS INTERMEDIATES THEREOF

(71) Applicant: EPIMERON INC., Calgary (CA)

(72) Inventors: Peter James FACCHINI, Calgary (CA); Xue CHEN, Calgary (CA); Thi Thu Thuy DANG, Calgary (CA)

(21) Appl. No.: 14/912,263

(22) PCT Filed: Aug. 15, 2014
(86) PCT No.: PCT/CA2014/050782

§ 371 Date: Feb. 16, 2016

Related U.S. Application Data
(60) Provisional application No. 61/866,733, filed on Aug. 16, 2013.
(60) Provisional application No. 62/008,877, filed on Jun. 6, 2014.

(51) Int. Cl. C12P 17/18; C07D 491/056

(52) U.S. Cl. CPC C12P 17/18; C07D 491/056

(57) ABSTRACT

Methods for the manufacture of the therapeutic chemical compound noscapine and noscapine synthesis intermediates comprising contacting a noscapine pathway precursor selected from a first canadine derivative, a first papaveroxine derivative and narcotine hemiacetal with at least one of the enzymes selected from the group CYP82Y1, CYP82X1, AT1, CYP82X2, OMT, CXE1 and NOS.

### RELATED APPLICATION

[0001] This Patent Cooperation Treaty Application claims the benefit under 35 USC §119(e) from U.S. Provisional Patent Application No. 61/866,733, filed on Aug. 16, 2013 and U.S. Provisional Patent Application No. 62/008,877, filed on Jun. 6, 2014, both of which are incorporated herein by reference in their entirety.

### FIELD OF THE DISCLOSURE

[0002] The compositions and methods disclosed herein relate to secondary metabolites and processes for manufacturing the same. More particularly, the present disclosure relates to noscapine and synthesis intermediates thereof and methods for manufacturing noscapine and synthesis intermediates.

### BACKGROUND OF THE DISCLOSURE

[0003] The following paragraphs are provided by way of background to the present disclosure. They are not however an admission that anything discussed therein is prior art or part of the knowledge of persons skilled in the art.

[0004] The biochemical pathways of living organisms are commonly classified as being either part of primary metabolism or part of secondary metabolism. Pathways that are part of a living cell's primary metabolism are involved in catabolism for energy production or in anabolism for building block production for the cell. Secondary metabolites, on the other hand, are produced by living cells without having any obvious anabolic or catabolic function. It has however long been recognized that many secondary metabolites are useful in many respects, including for example as therapeutic agents. The secondary metabolite noscapine is produced by opium poppy (Papaver somniferum) and other members of the Papaveraceae family of plants and may be used as a pharmaceutical agent, including in the treatment of cancer and as a cough suppressant (see: Mahmoudian et al., 2009, Recent patents on Anti-Cancer Drug Discovery 4 (1): 92-97).

[0005] The secondary metabolite pathway through which noscapine is produced in Papaver somniferum heretofore has not been disclosed. However it is noted that the prior art speculates that several enzymes are involved in the synthesis of noscapine in opium poppy. Notably Winzer et. al. (Winzer et al. Science, 2012, 336: 1704-1708) discloses ten genes which the authors believe to be involved in noscapine biosynthesis in opium poppy. It is unclear however how these genes are involved in noscapine biosynthesis and, moreover, whether and how these genes may be used in the commercial manufacture of noscapine.

[0006] Currently noscapine and certain noscapine synthesis intermediates may be harvested from natural sources, such as opium poppy. Alternatively these compounds may be prepared synthetically. The existing manufacturing methods for noscapine however suffer from low yields of noscapine and/or are expensive. No methods exist to biosynthetically make noscapine. There exists therefore in the art a need for improved methods for the synthesis of noscapine and noscapine synthesis intermediates.

### SUMMARY OF THE DISCLOSURE

[0007] The following paragraphs are intended to introduce the reader to the more detailed description that follows and not to define or limit the claimed subject matter of the present disclosure.

[0008] The present disclosure relates to the secondary metabolite noscapine and synthesis intermediates of noscapine, as well as to methods of making noscapine and synthesis intermediates thereof. The current disclosure further relates to certain enzymes capable of catalyzing reactions resulting in the conversion of noscapine synthesis intermediates to form noscapine.

[0009] Accordingly, the present disclosure provides in at least one aspect at least one embodiment of making noscapine or a noscapine synthesis intermediate comprising:
[0010] (a) providing a noscapine pathway precursor selected from a first canadine derivative, a first papaveroxine derivative and narcotine hemiacetal; and
[0011] (b) contacting the noscapine pathway precursor with at least one of the enzymes selected from the group of enzymes consisting of (i) CYP82Y1; (ii) CYP82X2; (iii) AT1; (iv) CYP82X1; (v) OMT; (vi) CXE1; and (vii) NOS under reaction conditions permitting the catalysis of the noscapine pathway precursor to form noscapine or the noscapine synthesis intermediate, wherein the noscapine synthesis intermediate is a second canadine derivative, a first or second papaveroxine derivative, narcotine hemiacetal or noscapine;
[0012] and
[0013] wherein the first canadine derivative has the chemical formula (I):

[chemical structure]

[0014] wherein R₁ represents a hydrogen atom, hydroxyl or O-acetyl;
[0015] wherein R₂ represents a hydrogen atom or hydroxyl; and
[0016] wherein R₃ represents a hydrogen atom or hydroxyl;
[0017] wherein the second canadine derivative has the chemical formula (II):

[chemical structure]

[0018] wherein R₄ represents a hydrogen atom, hydroxyl; or O-acetyl; and
[0019] wherein R₅ represents a hydrogen atom or hydroxyl; and
[0020] wherein the first and second papaveroxine derivative have the chemical formula (III):

[chemical structure]

[0021] wherein R₆ represents hydroxyl or methoxy; and
[0022] wherein R₇ represents hydroxyl or O-acetyl.

[0023] In preferred embodiments of the disclosure, the first canadine derivative is (S)—N-methylcanadine; 1-hydroxy-N-methylcanadine; 1,13-dihydroxy-N-methylcanadine, 1-hydroxy-13-O-acetyl-N-methylcanadine; or 1,8-dihydroxy-13-O-acetyl-N-methylcanadine; the second canadine derivative is 1-hydroxy-N-methylcanadine; 1,13-dihydroxy-N-methylcanadine, 1-hydroxy-13-O-acetyl-N-methylcanadine; or 1,8-dihydroxy-13-O-acetyl-N-methylcanadine; and the first and second papaveroxine derivatives are 4′-O-desmethoxy-3-O-acetyl-papaveroxine; papaveroxine; or 3-O-acetyl-papaveroxine.

[0024] In a further aspect, the present disclosure provides at least one embodiment of making noscapine and each of the following noscapine synthesis intermediates: 1-hydroxy-N-methylcanadine; 1,13-dihydroxy-N-methylcanadine; 1-hydroxy-O-acetyl-N-methylcanadine; 1,8-dihydroxy-13-O-acetyl-N-methylcanadine; 4′-O-desmethoxy-3-O-acetyl-papaveroxine; 3-O-acetyl-papaveroxine; papaveroxine; and narcotine hemiacetal. Accordingly, the present disclosure further provides in at least one aspect:
[0025] (I) at least one embodiment of making noscapine comprising:
   [0026] (a) providing (a) (S)—N-methylcanadine; and
   [0027] (b) contacting (S)—N-methylcanadine with a mixture comprising catalytic quantities of the enzymes (i) CYP82Y1; (ii) CYP82X2; (iii) AT1; (iv) CYP82X1; (v) OMT; (vi) CXE1; and (vii) NOS under reaction conditions permitting an enzyme catalyzed chemical conversion of (S)—N-methylcanadine to noscapine.
[0028] (II) at least one embodiment of making narcotine hemiacetal comprising:
   [0029] (a) providing (a) (S)—N-methylcanadine; and
   [0030] (b) contacting (S)—N-methylcanadine with a mixture comprising catalytic quantities of the enzymes (a) CYP82Y1; (b) CYP82X2; (c) AT1; (d) CYP82X1; (e) OMT and (f) CXE1 under reaction conditions permitting an enzyme catalyze chemical conversion of (S)—N-methylcanadine to narcotine hemiacetal.
[0031] (III) at least one embodiment of making papaveroxine comprising:
   [0032] (a) providing (a) (S)—N-methylcanadine; and
   [0033] (b) contacting (S)—N-methylcanadine with a mixture comprising catalytic quantities of the enzymes (a) CYP82Y1; (b) CYP82X2; (c) AT1; (d) CYP82X1; (e) OMT and (0 CXE1 under reaction conditions permitting an enzyme catalyzed chemical conversion of (S)—N-methylcanadine to papaveroxine; and
[0034] (IV) at least one embodiment of making 3-O-acetyl-papaveroxine comprising:
   [0035] (a) providing (a) (S)—N-methylcanadine; and
   [0036] (b) contacting (S)—N-methylcanadine with a mixture comprising catalytic quantities of the enzymes (a) CYP82Y1; (b) CYP82X2; (c) AT1; (d) CYP82X1 and (e) OMT under reaction conditions permitting an enzyme catalyzed chemical conversion of (S)—N-methylcanadine to 3-O-acetyl-papaveroxine;
[0037] (V) at least one embodiment of making 4′-O-desmethoxy-3-O-acetyl-papaveroxine comprising:
   [0038] (a) providing (a) (S)—N-methylcanadine; and
   [0039] (b) contacting (S)—N-methylcanadine with a mixture comprising catalytic quantities of the enzymes (a) CYP82Y1; (b) CYP82X2; (c) AT1 and (d) CYP82X1 under reaction conditions permitting an enzyme catalyzed chemical conversion of (S)—N-methylcanadine to 4′-O-desmethoxy-3-O-acetyl-papaveroxine;
[0040] (VI) at least one embodiment of making 1,8-dihydroxy-13-O-acetyl-N-methylcanadine comprising:
   [0041] (a) providing (a) (S)—N-methylcanadine; and
   [0042] (b) contacting (S)—N-methylcanadine with a mixture comprising catalytic quantities of the enzymes (a) CYP82Y1; (b) CYP82X2; (c) AT1 and (d) CYP82X1 under reaction conditions permitting an enzyme catalyzed chemical conversion of (S)—N-methylcanadine to 1,8-dihydroxy-13-O-acetyl-N-methylcanadine;
[0043] (VII) at least one embodiment of making 1-hydroxy-13-O-acetyl-N-methylcanadine comprising:
   [0044] (a) providing (a) (S)—N-methylcanadine; and
   [0045] (b) contacting (S)—N-methylcanadine with a mixture comprising catalytic quantities of the enzymes (a) CYP82Y1; (b) CYP82X2 and (c) AT1 under reaction conditions permitting an enzyme catalyzed chemical conversion of (S)—N-methylcanadine to 1-hydroxy-13-O-acetyl-N-methylcanadine;
[0046] (VIII) at least one embodiment of making 1,13-dihydroxy-N-methylcanadine comprising:
   [0047] (a) providing (a) (S)—N-methylcanadine; and
   [0048] (b) contacting (S)—N-methylcanadine with a mixture comprising catalytic quantities of the enzymes (a) CYP82Y1 and (b) CYP82X2 under reaction conditions permitting an enzyme catalyzed chemical conversion of (S)—N-methylcanadine to 1,13-dihydroxy-N-methylcanadine; and
[0049] (IX) at least one embodiment of making 1-hydroxy-N-methylcanadine comprising:
   [0050] (a) providing (a) (S)—N-methylcanadine; and
   [0051] (b) contacting (S)—N-methylcanadine with a mixture comprising catalytic quantities of the enzyme CYP82Y1 under reaction conditions permitting an enzyme catalyzed chemical conversion of (S)—N-methylcanadine to 1-hydroxy-N-methylcanadine;

[0052] In a further aspect, the present disclosure relates to compounds that may be derivatized from noscapine synthesis intermediates, and methods of making such derivatized compounds. Thus, in a further aspect, the present disclosure provides, in at least one embodiment, methods of preparing certain derivatives of noscapine synthesis intermediates, including narcotoline hemiacetal and narcotinoline.

[0053] In yet a further aspect, the present disclosure provides, in at least one embodiment, the aforementioned embodiments wherein the mixtures comprising catalytic quantities of enzyme(s) and the noscapine synthesis intermediate are brought together under in vitro reaction conditions. In another embodiment, the mixtures comprising catalytic quantities of enzymes and the noscapine synthesis intermediate are brought together under in vivo reaction conditions.

[0054] The present disclosure further provides in substantially pure form the following noscapine synthesis intermediates: 1-hydroxy-N-methylcanadine; 1,13-dihydroxy-N-methylcanadine; 1-hydroxy-O-acetyl-N-methylcanadine; and 4′-O-desmethoxy-3-O-acetyl-papaveroxine.

[0055] Other features and advantages of the present disclosure will become apparent from the following detailed description. It should be understood, however, that the detailed description, while indicating preferred implementations of the disclosure, are given by way of illustration only, since various changes and modifications within the spirit and scope of the disclosure will become apparent to those of skill in the art from the detailed description

### BRIEF DESCRIPTION OF THE DRAWINGS

[0056] The disclosure is in the hereinafter provided paragraphs described in relation to its Figures. The Figures provided herein are provided for illustration purposes and are not intended to limit the present disclosure.

[0057] FIG. 1 depicts a synthesis pathway for the manufacture of noscapine and synthesis intermediates thereof. Included are the chemical structures of the synthesis intermediates and enzymes capable of catalyzing chemical conversion of the synthesis intermediates.

[0058] FIG. 2 depicts the chemical structures for noscapine (FIG. 2.J) and the following synthesis intermediates thereof: (S)—N-methylcanadine (FIG. 2A); 1-hydroxy-N-methylcanadine (FIG. 2B); 1,13-dihydroxy-N-methylcanadine (FIG. 2C); 1-hydroxy-O-acetyl-N-methylcanadine (FIG. 2D); 1,8-dihydroxy-13-O-acetyl-N-methylcanadine (FIG. 2E); 4′-O-desmethoxy-3-O-acetyl-papaveroxine (FIG. 2F); 3-O-acetyl-papaveroxine (FIG. 2G); papaveroxine (FIG. 2H); and narcotine hemiacetal (FIG. 2I), respectively.

[0059] FIG. 3 depicts a western blot showing heterologous expression of CYP82Y1 in yeast. As further detailed in Example 3, Saccharomyces cerevisiae harboring pESC-leu2d::CPR (CPR), pESC-leu2d::CYP82Y1/CPR (CPR/82Y1), or pESC-leu2d::MSH/CPR (CPR/MSH) were induced on galactose, and CPR, CYP82Y1 or MSH (CYP82N4) recombinant proteins were detected using α-FLAG (CYP) and α-c-Myc (CPR) antibodies. Each lane contained 2 μg of total microsomal proteins.

[0060] FIG. 4 depicts a polyacrylamide gel showing the heterologous expression of NOS in Escherichia coli and purification of NOS from E. coli.

[0061] FIG. 5 depicts an LC-MS/MS ion chromatogram showing the in vitro conversion of (S)—N-methylcanadine to 1-hydroxy-N-methylcanadine by CYP82Y1. Shown is the formation of a reaction product with m/z 370, which is absent in the control.

[0062] FIG. 6 depicts certain Collision-induced Dissociation (CID) spectra of 1-hydroxy-N-methylcanadine and related compounds. Shown are the CID spectrum of 1-hydroxy-N-methylcanadine (FIG. 6A); narcotoline (FIG. 6B); (S)—N-methylcanadine (FIG. 6C); hydrastine (FIG. 6 D); fragmentation in MS³ of m/z 206 daughter ions of 1-hydroxy-N-methylcanadine (FIG. 6E); narcotinoline (FIG. 6F) and fragmentation in MS³ of m/z 190 daughter ions of (S)—N-methylcanadine (FIG. 6G); and hydrastine (FIG. 6F).

[0063] FIG. 7 depicts a LC-MS/MS ion chromatogram showing the in vitro conversion of narcotine hemiacetal to noscapine by NOS.

[0064] FIG. 8 depicts certain Collision-induced Dissociation (CID) spectra of narcotine hemiacetal (FIG. 8A) and noscapine (FIG. 8B).

[0065] FIG. 9 depicts an LC-MS/MS ion chromatogram showing the in vivo conversion of (S)—N-methylcanadine to 1-hydroxy-N-methylcanadine by CYP82Y1. Shown is the formation of a reaction product with m/z 370, which is absent in the control.

[0066] FIG. 10 depicts certain bar graphs showing the relative abundance of noscapine, narcotine hemiacetal and control alkaloids in infiltrated control (pTRV2) and NOS-silenced plants (pTRV-2-NOS).

[0067] FIG. 11 depicts certain bar graphs showing the relative abundance of noscapine, N-methylcanadine and control alkaloids in infiltrated control (pTRV2) and CYP82Y1 plants (pTRV-2-82Y1).

[0068] FIG. 12 depicts an immunoblot showing the expression of α-FLAG-tagged CYP82X1 and CYP82X2, and α-c-Myc-taged cytochrome P450 reductase (CPR) in microsomal fractions of Saccharomyces cerevisiae and expression of AT1, CXE1 and CXE2 in Escherichia coli. Shown are an immunoblot (FIG. 12A) and coomassie blue stained gels (FIG. 12B and FIG. 12 C).

[0069] FIG. 13 depicts various LC-MS/MS ion chromatograms showing in vitro activity of CYP82X2, AT1, CYP82X1, and CXE1 and production of 1,13 dihydroxy-N-methylcanadine, 1-hydroxy-13-O-acetyl-N-methylcanadine, 4′desmethoxy-3-O-acetyl-papaveroxine, narcotoline hemiacetal and narcotine hemiacetal. Shown are: (A) in vitro catalytic activities of CYP82X2 (CPR/82X2) and CYP82X1 (CPR/82X1) on (S)-1-hydroxy-N-methylcanadine (m/z 370) yielding (S)-1,13-dihydroxy-N-methylcanadine (m/z 386) and 4-O-demethylmacrantaldehyde (m/z 386), respectively. (FIG. 13A); (B) Absence of products when either CYP82X1 (CPR/82X1) or CYP82X2 (CPR/82X2) was incubated with (S)-1,13-dihydroxy-N-methylcanadine (m/z 386) (FIG. 13 B); (C) The activity of native recombinant AT1 on (S)-1,13-dihydroxy-N-methylcanadine (m/z 386), forming (S)-1-hydroxy-13-O-acetyl-N-methylcanadine (m/z 428). (FIG. 13 C); (D) The activity of CYP82X1 (CPR/82X1) converting (S)-1-hydroxy-13-O-acetyl-N-methylcanadine (m/z 428) to (S)-1,8-dihydroxy-13-O-acetyl-N-methylcanadine, which spontaneously rearranges to form 4′-O-desmethyl-3-O-acetylpapaveroxine (m/z 444). (FIG. 13D); (E) cleavage of the O-acetyl moiety from 3-O-acetylpapaveroxine (m/z 458) by native recombinant CXE1 yielding papaveroxine, which spontaneously rearranges to form narcotine hemiacetal (m/z 416). (FIG. 13 E).

[0070] FIG. 14 shows certain high-resolution collision-induced dissociation (CID), higher-energy collision-induced dissociation (HCD), and non-collisional pulsed Q dissociation (PQD) spectra relating to CYP82X2 substrates and reaction products. Shown are high-resolution CID (FIG. 14 A, D, G) and HCD (FIG. 14 B, E, H), and low-resolution PQD (FIG. 14 C, F, I) to compare the spectra of the enzymatic substrate (1-hydroxy-N-methylcanadine, m/z 370, FIG. 14 A, B, C), the CYP82X2 reaction product (m/z 386, FIG. 14 D, E, F), and an authentic standard of (S)-1,13-dihydroxy-N-methylcanadine (m/z 386, FIG. 14 G, H, I). Arrowheads indicate parent ions.

[0071] FIG. 15 shows certain NMR data relating to the enzymatic activity of AT1. Shown are the enzymatic substrate (S)-1,13-dihydroxy-N-methylcanadine (m/z 386) and the reaction product (S)-1-hydroxy-13-O-acetyl-N-methylcanadine (m/z 428) are shown.

[0072] FIG. 16 shows certain high-resolution collision-induced dissociation (CID), higher-energy collision-induced dissociation (HCD), and non-collisional pulsed Q dissociation (PQD) spectra relating to CYP82X1. Shown are high-resolution CID (FIG. 16 A, D, G) and HCD (FIG. 16 B, E, H), and low-resolution PQD (FIG. 16 C, F, I), to compare the spectra of the enzymatic reaction product (narcotoline hemiacetal, m/z 402, FIG. 16 A, B, C), the NOS reaction product (m/z 400, FIG. 16 D, E, F), and an authentic standard of narcotoline (m/z 400, FIG. 16 G, H, I). Arrowheads indicate parent ions.

[0073] FIG. 17 shows certain high-resolution collision-induced dissociation (CID), higher-energy collision-induced dissociation (HCD), and non-collisional pulsed Q dissociation (PQD) spectra relating to CXE1. Shown are high-resolution CID (FIG. 17 A, D, G) and HCD (FIG. 17 B, E, H), and low-resolution PQD (FIG. 17 C, F, I), to compare the spectra of the enzymatic substrate (3-O-acetylpapaveroxine, m/z 458, FIG. 17 A, B, C), the CXE1 reaction product (m/z 416, FIG. 17 D, E, F), and an authentic standard of narcotine hemiacetal (m/z 416, FIG. 17 G, H, I). Arrowheads indicate parent ions.

[0074] FIG. 18 shows certain data relating to the gene silencing of CYP82X2. Shown are: a fragment (grey box) of the CYP82X2 cDNA used to assemble the pTRV2 construct (FIG. 18A). Ethidium bromide-stained agarose gels showing the detection of the pTRV2 vector by RT-PCR (FIG. 18B). Relative CYP82X2 transcript abundance in control (pTRV2) and CYP82X2-silenced (pTRV2-82X2) plants (FIG. 18C). Total ion chromatograms showing the major alkaloid profiles of control (pTRV2) and CYP82X2-silenced (pTRV2-82X2) plants (FIG. 18D). Relative abundance of major noted latex alkaloids, and other noted alkaloids showing suppressed levels in CYP82X2-silenced (pTRV2-82X2) plants compared with controls (pTRV2) (FIG. 18 E).

[0075] FIG. 19 shows certain data relating to the gene silencing of AT1. Shown are: a fragment (grey box) of the AT1 cDNA used to assemble the pTRV2 construct (FIG. 19 A). Ethidium bromide-stained agarose gels showing the detection of the pTRV2 vector by RT-PCR (FIG. 19B). Relative AT1 transcript abundance in control (pTRV2) and AT1-silenced (pTRV2-AT1) plants (FIG. 19C). (D) Total ion chromatograms showing the major alkaloid profiles of control (pTRV2) and AT1-silenced (pTRV2-AT1) plants (FIG. 19D). Relative abundance of major latex alkaloids, and other alkaloids showing suppressed levels in AT1-silenced (pTRV2-AT1) plants compared with controls (pTRV2) (FIG. 19 E).

[0076] FIG. 20 shows certain data relating to the gene silencing of CYP82X1. Shown are: a fragment (grey box) of the CYP82X1 cDNA used to assemble the pTRV2 construct (FIG. 20 A). Ethidium bromide-stained agarose gels showing the detection of the pTRV2 vector by RT-PCR (FIG. 20 B). Relative CYP82X1 transcript abundance in control (pTRV2) and CYP82X1-silenced (pTRV2-82X1) plants (FIG. 20 C). Total ion chromatograms showing the major alkaloid profiles of control (pTRV2) and CYP82X1-silenced (pTRV2-82X1) plants (FIG. 20 D). Relative abundance of major latex alkaloids, and other alkaloids showing suppressed levels in CYP82X1-silenced (pTRV2-82X1) plants compared with controls (pTRV2) (FIG. 20 E).

[0077] FIG. 21 shows certain data relating to the gene silencing of CXE1. Shown are: a fragment (grey box) of the CXE1 cDNA used to assemble the pTRV2 construct (FIG. 21A). Ethidium bromide-stained agarose gels showing the detection of the pTRV2 vector by RT-PCR (FIG. 21B) Relative CXE1 transcript abundance in control (pTRV2) and CXE1-silenced (pTRV2-CXE1) plants (FIG. 21C). Total ion chromatograms showing the major alkaloid profiles of control (pTRV2) and CXE1-silenced (pTRV2-CXE1) plants (FIG. 21D). Relative abundance of major latex alkaloids, and other alkaloids showing suppressed levels in CXE1-silenced (pTRV2-CXE1) plants compared with controls (pTRV2) (FIG. 21E).

[0078] FIG. 22 depicts a synthesis pathway for the manufacture of narcotoline and narcotoline hemiacetal and synthesis intermediates thereof. Included are the chemical structures of the synthesis intermediates and enzymes capable of catalyzing chemical conversion of the synthesis intermediates.

[0079] FIG. 23 depicts the chemical structures for 4′-desmethoxy-papaveroxine (FIG. 23A), narcotoline hemiacetal (FIG. 23B) and narcotoline (FIG. 23C).

### DETAILED DESCRIPTION OF THE DISCLOSURE

[0080] Various compositions and processes will be described below to provide an example of an embodiment of each claimed subject matter. No embodiment described below limits any claimed subject matter and any claimed subject matter may cover processes, compositions or systems that differ from those described below. The claimed subject matter is not limited to compositions or processes having all of the features of any one composition, system or process described below or to features common to multiple or all of the compositions, systems or processes described below. It is possible that a composition, system or process described below is not an embodiment of any claimed subject matter. Any subject matter disclosed in a composition, system or process described below that is not claimed in this document may be the subject matter of another protective instrument, for example, a continuing patent application, and the applicants, inventors or owners do not intend to abandon, disclaim or dedicate to the public any such subject matter by its disclosure in this document.

[0081] It should be noted that terms of degree such as “substantially”, “about” and “approximately” as used herein mean a reasonable amount of deviation of the modified term such that the end result is not significantly changed. These terms of degree should be construed as including a deviation of the modified term if this deviation would not negate the meaning of the term it modifies.

[0082] As used herein, the wording “and/or” is intended to represent an inclusive-or. That is, “X and/or Y” is intended to mean X or Y or both, for example. As a further example, “X, Y, and/or Z” is intended to mean X or Y or Z or any combination thereof.

[0083] All publications, patents and patent applications are herein incorporated by reference in their entirety to the same extent as if each individual publication, patent or patent application was specifically and individually indicated to be incorporated by reference in its entirety.

[0084] As hereinbefore mentioned, the present disclosure relates to the secondary metabolite noscapine and synthesis intermediates of noscapine, as well as to methods of making noscapine and synthesis intermediates thereof. The current disclosure further relates to certain enzymes capable of catalyzing reactions resulting in the conversion of noscapine synthesis intermediates to form noscapine. The herein provided methods represent a novel and efficient means of manufacturing noscapine and noscapine synthesis intermediates. The methods provided herein do not rely on chemical synthesis and may be conducted at commercial scale. To the best of the inventors' knowledge, the current disclosure provides for the first time a methodology to manufacture noscapine using living cells not normally capable of synthesizing noscapine. Such cells may be used as a source whence noscapine may economically be extracted. Noscapine produced in accordance with the present disclosure is useful inter alia in the manufacture of pharmaceutical compositions for the treatment of cancer. Furthermore the present disclosure provides various heretofore unknown noscapine synthesis intermediates. These synthesis intermediates are useful in the manufacture of noscapine, as well as noscapine derivatives.

[0085] Accordingly, the present disclosure provides in at least one aspect at least one embodiment of making noscapine or a noscapine synthesis intermediate comprising:
[0086] (a) providing a noscapine pathway precursor selected from a first canadine derivative, a first papaveroxine derivative and narcotine hemiacetal; and
[0087] (b) contacting the noscapine pathway precursor with at least one of the enzymes selected from the group of enzymes consisting of (i) CYP82Y1; (ii) CYP82X2; (iii) AT1; (iv) CYP82X1; (v) OMT; (vi) CXE1; and (vii) NOS under reaction conditions permitting the catalysis of the noscapine pathway precursor to form noscapine or the noscapine synthesis intermediate wherein the noscapine synthesis intermediate is a second canadine derivative, a first or second papaveroxine derivative, narcotine hemiacetal or noscapine;
[0088] and
[0089] wherein the first canadine derivative has the chemical formula (I):

[chemical structure]

[0090] wherein R₁ represents a hydrogen atom, hydroxyl, or O-acetyl;
[0091] wherein R₂ represents a hydrogen atom or hydroxyl; and
[0092] wherein R₃ represents a hydrogen atom or hydroxyl;
[0093] wherein the second canadine derivative has the chemical formula (II):

[chemical structure]

[0094] wherein R₄ represents a hydrogen atom, hydroxyl; or O-acetyl; and
[0095] wherein R₅ represents a hydrogen atom or hydroxyl; and
[0096] wherein the first and second papaveroxine derivative have the chemical formula (III):

[chemical structure]

[0097] wherein R₆ represents hydroxyl or methoxy; and
[0098] wherein R₇ represents hydroxyl or O-acetyl.

[0099] In preferred embodiments of the disclosure the first canadine derivative is (S)—N-methylcanadine; 1-hydroxy-N-methylcanadine; 1,13-dihydroxy-N-methylcanadine, 1-hydroxy-13-O-acetyl-N-methylcanadine; or 1,8-dihydroxy-13-O-acetyl-N-methylcanadine; the second canadine derivative is 1-hydroxy-N-methylcanadine; 1,13-dihydroxy-N-methylcanadine, 1-hydroxy-13-O-acetyl-N-methylcanadine; or 1,8-dihydroxy-13-O-acetyl-N-methylcanadine; and the first and second papaveroxine derivatives are 4′-O-desmethoxy-3-O-acetyl-papaveroxine; papaveroxine; or 3-O-acetyl-papaveroxine.

### DEFINITIONS

[0100] The term “noscapine” as used herein refers to a chemical compound having the chemical structure depicted in FIG. 2J.

[0101] The term “(S)—N-methylcanadine” as used herein refers to a chemical compound having the chemical structure depicted in FIG. 2A.

[0102] The term “1-hydroxy-N-methylcanadine” as used herein refers to a chemical compound having the chemical structure depicted in FIG. 2B.

[0103] The term “1,13-dihydroxy-N-methylcanadine” as used herein refers to a chemical compound having the chemical structure depicted in FIG. 2C.

[0104] The term “1-hydroxy-13-O-acetyl-N-methylcanadine” as used herein refers to a chemical compound having the chemical structure depicted in FIG. 2D.

[0105] The term “1,8-dihydroxy-13-O-acetyl-N-methylcanadine” as used herein refers to a chemical compound having the chemical structure depicted in FIG. 2E.

[0106] The terms “4′-O-desmethoxy-3-O-acetyl-papaveroxine” and “4′-O-desmethyl-3-O-acetylpapaveroxine”, as may be used herein interchangeably, refer to a chemical compound having the chemical structure depicted in FIG. 2F.

[0107] The term “3-O-acetyl-papaveroxine” as used herein refers to a chemical compound having the chemical structure depicted in FIG. 2G.

[0108] The term “papaveroxine” as used herein refers to a chemical compound having the chemical structure depicted in FIG. 2H.

[0109] The term “narcotine hemiacetal” as used herein refers to a chemical compound having the chemical structure depicted in FIG. 2I.

[0110] The terms “4′-desmethoxypapaveroxine” and “4′-desmethylpapaveroxine”, as may be used herein interchangeably, refer to a chemical compound having the chemical structure depicted in FIG. 23A.

[0111] The term “narcotoline hemiacetal” as used herein refers to a chemical compound having the chemical structure depicted in FIG. 23B.

[0112] The term “narcotoline” as used herein refers to a chemical compound having the chemical structure depicted in FIG. 23C.

[0113] The term “papaveroxine derivative” as used herein includes any specified derivative compounds of papaveroxine, and may further include papaveroxine, as the context permits.

[0114] The terms “noscapine pathway” or “noscapine synthesis pathway”, as may be used interchangeably herein, refer to the metabolic pathway for the synthesis of noscapine depicted in FIG. 1. When a first chemical compound within the noscapine pathway is referenced as “upstream” of a second chemical compound in the pathway, it is meant herein that synthesis of the first chemical compound precedes synthesis of the second chemical compound. Conversely, when a first chemical compound is referenced as “downstream” from a second chemical compound in the noscapine pathway, it is meant herein that synthesis of the second chemical compound precedes synthesis of the first chemical compound.

[0115] The term “noscapine pathway precursor” as used herein refers to any of the chemical compounds in the noscapine synthesis pathway set forth in FIG. 2A; FIG. 2B; FIG. 2C; FIG. 2D; FIG. 2E; FIG. 2F; FIG. 2G; FIG. 2H and FIG. 2I; in conjunction with the term noscapine synthesis intermediate, noscapine pathway precursor refers to a compound synthesized upstream of a noscapine synthesis intermediate.

[0116] The term “noscapine synthesis intermediate” as used herein refers to any of the chemical compounds in the noscapine synthesis pathway set forth in FIG. 2B; FIG. 2C; FIG. 2D; FIG. 2E; FIG. 2F; FIG. 2G; FIG. 2H and FIG. 2I; in conjunction with the term noscapine pathway precursor, noscapine synthesis intermediate refers to a compound synthesized downstream of a noscapine pathway precursor.

[0117] The term “noscapine synthesis intermediate derivative” as used herein refers to any chemical compound that may be derivatized from a noscapine synthesis intermediate or noscapine pathway precursor, including, without limitation, 4′-desmethoxy-papaveroxine, narcotoline hemiacetal and narcotoline, but excluding any of the compounds set forth in FIG. 2A-FIG. 2I.

[0118] The term “CYP82Y1” refers to any and all enzymes comprising a sequence of amino acid residues which is (i) substantially identical to the amino acid sequences constituting any CYP82Y1 polypeptide set fort herein, including, for example, SEQ.ID NO:2, or (ii) encoded by a nucleic acid sequence capable of hybridizing under at least moderately stringent conditions to any nucleic acid sequence encoding any CYP82Y1 polypeptide set forth herein, but for the use of synonymous codons.

[0119] The term “CYP82X2” refers to any and all enzymes comprising a sequence of amino acid residues which is (i) substantially identical to the amino acid sequences constituting any CYP82X2 polypeptide set forth herein, including, for example, SEQ.ID NO:4, or (ii) encoded by a nucleic acid sequence capable of hybridizing under at least moderately stringent conditions to any nucleic acid sequence encoding any CYP82X2 polypeptide set forth herein, but for the use of synonymous codons.

[0120] The term “AT1” refers to any and all enzymes comprising a sequence of amino acid residues which is (i) substantially identical to the amino acid sequences constituting any AT1 polypeptide set forth herein, including, for example, SEQ.ID NO:6, or (ii) encoded by a nucleic acid sequence capable of hybridizing under at least moderately stringent conditions to any nucleic acid sequence encoding any AT1 polypeptide set forth herein, but for the use of synonymous codons.

[0121] The term “CYP82X1” refers to any and all enzymes comprising a sequence of amino acid residues which is (i) substantially identical to the amino acid sequences constituting any CYP82X1 polypeptide set fort herein, including, for example, SEQ.ID NO:8, or (ii) encoded by a nucleic acid sequence capable of hybridizing under at least moderately stringent conditions to any nucleic acid sequence encoding any CYP82X1 polypeptide set forth herein, but for the use of synonymous codons.

[0122] The term “OMT” refers to any and all enzymes comprising a sequence of amino acid residues which is (i) substantially identical to the amino acid sequences constituting any OMT polypeptide set forth herein, including, for example, SEQ.ID NO:10, or (ii) encoded by a nucleic acid sequence capable of hybridizing under at least moderately stringent conditions to any nucleic acid sequence encoding any OMT polypeptide set forth herein, but for the use of synonymous codons.

[0123] The term “CXE1” refers to any and all enzymes comprising a sequence of amino acid residues which is (i) substantially identical to the amino acid sequences constituting any CXE1 polypeptide set forth herein, including, for example, SEQ.ID NO:12, or (ii) encoded by a nucleic acid sequence capable of hybridizing under at least moderately stringent conditions to any nucleic acid sequence encoding any CXE1 polypeptide set forth herein, but for the use of synonymous codons. Included within the definition of CXE1 is further specifically an enzyme having an amino acid sequence substantially identical to SEQ.ID NO:12, referred to as CXE2 for which the sequence is set forth in SEQ.ID NO:16.

[0124] The terms “NOS” or “SDR1”, which may be used interchangeably herein, refer to any and all enzymes comprising a sequence of amino acid residues which is (i) substantially identical to the amino acid sequences constituting any NOS or SDR1 polypeptide set forth herein, including, for example, SEQ.ID NO:14, or (ii) encoded by a nucleic acid sequence capable of hybridizing under at least moderately stringent conditions to any nucleic acid sequence encoding any NOS or SDR1 polypeptide set forth herein, but for the use of synonymous codons.

[0125] The term “nucleic acid sequence” as used herein refers to a sequence of nucleoside or nucleotide monomers consisting of naturally occurring bases, sugars and intersugar (backbone) linkages. The term also includes modified or substituted sequences comprising non-naturally occurring monomers or portions thereof. The nucleic acid sequences of the present disclosure may be deoxyribonucleic acid sequences (DNA) or ribonucleic acid sequences (RNA) and may include naturally occurring bases including adenine, guanine, cytosine, thymidine and uracil. The sequences may also contain modified bases. Examples of such modified bases include aza and deaza adenine, guanine, cytosine, thymidine and uracil, and xanthine and hypoxanthine.

[0126] The herein interchangeably used terms “nucleic acid sequence encoding CYP82Y1” and “nucleic acid sequence encoding a CYP82Y1 polypeptide”, refer to any and all nucleic acid sequences encoding a CYP82Y1 polypeptide, including, for example, SEQ.ID NO:1. Nucleic acid sequences encoding a CYP82Y1 polypeptide further include any and all nucleic acid sequences which (i) encode polypeptides that are substantially identical to the CYP82Y1 polypeptide sequences set forth herein; or (ii) hybridize to any CYP82Y1 nucleic acid sequences set forth herein under at least moderately stringent hybridization conditions or which would hybridize thereto under at least moderately stringent conditions but for the use of synonymous codons.

[0127] The herein interchangeably used terms “nucleic acid sequence encoding CYP82X2” and “nucleic acid sequence encoding a CYP82X2 polypeptide”, refer to any and all nucleic acid sequences encoding a CYP82X2 polypeptide, including, for example, SEQ.ID NO:3. Nucleic acid sequences encoding a CYP82X2 polypeptide further include any and all nucleic acid sequences which (i) encode polypeptides that are substantially identical to the CYP82X2 polypeptide sequences set forth herein; or (ii) hybridize to any CYP82X2 nucleic acid sequences set forth herein under at least moderately stringent hybridization conditions or which would hybridize thereto under at least moderately stringent conditions but for the use of synonymous codons.

[0128] The herein interchangeably used terms “nucleic acid sequence encoding AT1” and “nucleic acid sequence encoding an AT1 polypeptide”, refer to any and all nucleic acid sequences encoding an AT1 polypeptide, including, for example, SEQ.ID NO:5. Nucleic acid sequences encoding an AT1 polypeptide further include any and all nucleic acid sequences which (i) encode polypeptides that are substantially identical to the AT1 polypeptide sequences set forth herein; or (ii) hybridize to any AT1 nucleic acid sequences set forth herein under at least moderately stringent hybridization conditions or which would hybridize thereto under at least moderately stringent conditions but for the use of synonymous codons.

[0129] The herein interchangeably used terms “nucleic acid sequence encoding CYP82X1” and “nucleic acid sequence encoding a CYP82X1 polypeptide”, refer to any and all nucleic acid sequences encoding a CYP82X1 polypeptide, including, for example, SEQ.ID NO:7. Nucleic acid sequences encoding a CYP82X1 polypeptide further include any and all nucleic acid sequences which (i) encode polypeptides that are substantially identical to the CYP82X1 polypeptide sequences set forth herein; or (ii) hybridize to any CYP82X1 nucleic acid sequences set forth herein under at least moderately stringent hybridization conditions or which would hybridize thereto under at least moderately stringent conditions but for the use of synonymous codons.

[0130] The herein interchangeably used terms “nucleic acid sequence encoding OMT” and “nucleic acid sequence encoding a OMT polypeptide”, refer to any and all nucleic acid sequences encoding a OMT polypeptide, including, for example, SEQ.ID NO:9. Nucleic acid sequences encoding a OMT polypeptide further include any and all nucleic acid sequences which (i) encode polypeptides that are substantially identical to the OMT polypeptide sequences set forth herein; or (ii) hybridize to any OMT nucleic acid sequences set forth herein under at least moderately stringent hybridization conditions or which would hybridize thereto under at least moderately stringent conditions but for the use of synonymous codons.

[0131] The herein interchangeably used terms “nucleic acid sequence encoding CXE1” and “nucleic acid sequence encoding a CXE1 polypeptide”, refer to any and all nucleic acid sequences encoding a CXE1 polypeptide, including, for example, SEQ.ID NO:11. Nucleic acid sequences encoding a CXE1 polypeptide further include any and all nucleic acid sequences which (i) encode polypeptides that are substantially identical to the CXE1 polypeptide sequences set forth herein; or (ii) hybridize to any CXE1 nucleic acid sequences set forth herein under at least moderately stringent hybridization conditions or which would hybridize thereto under at least moderately stringent conditions but for the use of synonymous codons. Included within the definition of nucleic acid sequence encoding CXE1 is further specifically a nucleic acid sequence substantially identical to SEQ.ID NO:11, referred to as a nucleic acid sequence encoding CXE2 for which the sequence is set forth in SEQ.ID NO: 15.

[0132] The herein interchangeably used terms “nucleic acid sequence encoding NOS”, “nucleic acid sequence encoding a NOS polypeptide”, “nucleic acid sequence encoding SDR1”, “nucleic acid sequence encoding an SDR1 polypeptide”, refer to any and all nucleic acid sequences encoding an NOS or SDR1 polypeptide, including, for example, SEQ.ID NO:13. Nucleic acid sequences encoding a NOS or SDR1 polypeptide further include any and all nucleic acid sequences which (i) encode polypeptides that are substantially identical to the NOS or SDR1 polypeptide sequences set forth herein; or (ii) hybridize to any NOS or SDR1 nucleic acid sequences set forth herein under at least moderately stringent hybridization conditions or which would hybridize thereto under at least moderately stringent conditions but for the use of synonymous codons.

[0133] By the term “substantially identical” it is meant that two polypeptide sequences preferably are at least 70% identical, and more preferably are at least 85% identical and most preferably at least 95% identical, for example 96%, 97%, 98% or 99% identical. In order to determine the percentage of identity between two polypeptide sequences the amino acid sequences of such two sequences are aligned, using for example the alignment method of Needleman and Wunsch (J. Mol. Biol., 1970, 48: 443), as revised by Smith and Waterman (Adv. Appl. Math., 1981, 2: 482) so that the highest order match is obtained between the two sequences and the number of identical amino acids is determined between the two sequences. Methods to calculate the percentage identity between two amino acid sequences are generally art recognized and include, for example, those described by Carillo and Lipton (SIAM J. Applied Math., 1988, 48:1073) and those described in Computational Molecular Biology, Lesk, e.d. Oxford University Press, New York, 1988, Biocomputing: Informatics and Genomics Projects. Generally, computer programs will be employed for such calculations. Computer programs that may be used in this regard include, but are not limited to, GCG (Devereux et al., Nucleic Acids Res., 1984, 12: 387) BLASTP, BLASTN and FASTA (Altschul et al., J. Molec. Biol., 1990:215:403). A particularly preferred method for determining the percentage identity between two polypeptides involves the Clustal W algorithm (Thompson, J D, Higgines, D G and Gibson T J, 1994, Nucleic Acid Res 22(22): 4673-4680 together with the BLOSUM 62 scoring matrix (Henikoff S & Henikoff, J G, 1992, Proc. Natl. Acad. Sci. USA 89: 10915-10919 using a gap opening penalty of 10 and a gap extension penalty of 0.1, so that the highest order match obtained between two sequences wherein at least 50% of the total length of one of the two sequences is involved in the alignment.

[0134] By “at least moderately stringent hybridization conditions” it is meant that conditions are selected which promote selective hybridization between two complementary nucleic acid molecules in solution. Hybridization may occur to all or a portion of a nucleic acid sequence molecule. The hybridizing portion is typically at least 15 (e.g. 20, 25, 30, 40 or 50) nucleotides in length. Those skilled in the art will recognize that the stability of a nucleic acid duplex, or hybrids, is determined by the Tm, which in sodium containing buffers is a function of the sodium ion concentration and temperature (Tm=81.5° C.−16.6 (Log 10 [Na+])+0.41(% (G+C)−600/l), or similar equation). Accordingly, the parameters in the wash conditions that determine hybrid stability are sodium ion concentration and temperature. In order to identify molecules that are similar, but not identical, to a known nucleic acid molecule a 1% mismatch may be assumed to result in about a 1° C. decrease in Tm, for example if nucleic acid molecules are sought that have a >95% identity, the final wash temperature will be reduced by about 5° C. Based on these considerations those skilled in the art will be able to readily select appropriate hybridization conditions. In preferred embodiments, stringent hybridization conditions are selected. By way of example the following conditions may be employed to achieve stringent hybridization: hybridization at 5× sodium chloride/sodium citrate (SSC)/5×Denhardt's solution/1.0% SDS at Tm (based on the above equation) −5° C., followed by a wash of 0.2×SSC/0.1% SDS at 60° C. Moderately stringent hybridization conditions include a washing step in 3×SSC at 42° C. It is understood however that equivalent stringencies may be achieved using alternative buffers, salts and temperatures. Additional guidance regarding hybridization conditions may be found in: Current Protocols in Molecular Biology, John Wiley & Sons, N.Y., 1989, 6.3.1.-6.3.6 and in: Sambrook et al., Molecular Cloning, a Laboratory Manual, Cold Spring Harbor Laboratory Press, 1989, Vol. 3.

[0135] The term “chimeric” as used herein in the context of nucleic acid sequences refers to at least two linked nucleic acid sequences, which are not naturally linked. Chimeric nucleic acid sequences include linked nucleic acid sequences of different natural origins. For example a nucleic acid sequence constituting a yeast promoter linked to a nucleic acid sequence encoding a CYP82Y1 protein is considered chimeric. Chimeric nucleic acid sequences also may comprise nucleic acid sequences of the same natural origin, provided they are not naturally linked. For example a nucleic acid sequence constituting a promoter obtained from a particular cell-type may be linked to a nucleic acid sequence encoding a polypeptide obtained from that same cell-type, but not normally linked to the nucleic acid sequence constituting the promoter. Chimeric nucleic acid sequences also include nucleic acid sequences comprising any naturally occurring nucleic acid sequence linked to any non-naturally occurring nucleic acid sequence.

[0136] The terms “substantially pure” and “isolated”, as may be used interchangeably herein describe a compound, e.g., a pathway synthesis intermediate or a polypeptide, which has been separated from components that naturally accompany it. Typically, a compound is substantially pure when at least 60%, more preferably at least 75%, more preferably at least 90%, 95%, 96%, 97%, or 98%, and most preferably at least 99% of the total material (by volume, by wet or dry weight, or by mole percent or mole fraction) in a sample is the compound of interest. Purity can be measured by any appropriate method, e.g., in the case of polypeptides, by chromatography, gel electrophoresis or HPLC analysis.

[0137] The term “in vivo” as used herein to describe methods of making noscapine or noscapine synthesis intermediates refers to contacting a noscapine pathway precursor with an enzyme capable of catalyzing conversion of a noscapine precursor within a living cell, including, for example, a microbial cell or a plant cell, to form a noscapine synthesis intermediate or noscapine.

[0138] The term “in vitro” as used herein to describe methods of making noscapine or noscapine synthesis intermediates refers to contacting a noscapine pathway precursor with an enzyme capable of catalyzing conversion of a noscapine precursor in an environment outside a living cell, including, without limitation, for example, in a microwell plate, a tube, a flask, a beaker, a tank, a reactor and the like, to form a noscapine synthesis intermediate or noscapine.

### General Implementation

### Noscapine Synthesis

[0139] In one embodiment of the disclosure there is provided a method making noscapine. Accordingly, there is provided a method of making noscapine comprising:
[0140] (a) providing a canadine derivative, a papaveroxine derivative or narcotine hemiacetal; and
[0141] (b) contacting the canadine derivative, the papaveroxine derivative or narcotine hemiacetal with at least one of the enzymes selected from the group of enzymes consisting of (i) CYP82Y1; (ii) CYP82X2; (iii) AT1; (iv) CYP82X1; (v) OMT; (vi) CXE1; and (vii) NOS under reaction conditions permitting the catalysis of the canadine derivative, the papaveroxine derivative or narcotine hemiacetal to form noscapine;

[0142] and wherein the canadine derivative has the chemical formula (I) and the papaveroxine derivative has the chemical formula (III).

[0143] In a further embodiment, there is provided a method of making noscapine comprising:
[0144] (a) providing (S)—N-methylcanadine; and
[0145] (b) contacting (S)—N-methylcanadine with a mixture comprising catalytic quantities of the enzymes (i) CYP82Y1; (ii) CYP82X2; (iii) AT1; (iv) CYP82X1; (v) OMT; (vi) CXE1; and (vii) NOS under reaction conditions permitting an enzyme catalyzed chemical conversion of (S)—N-methylcanadine to noscapine.

[0146] In a further embodiment, there is provided a method of making noscapine comprising:
[0147] (a) providing 1-hydroxy-N-methylcanadine; and
[0148] (b) contacting 1-hydroxy-N-methylcanadine with a mixture comprising catalytic quantities of the enzymes (i) CYP82X2; (ii) AT1; (iii) CYP82X1; (iv) OMT; (v) CXE1; and (vi) NOS under reaction conditions permitting an enzyme catalyzed chemical conversion of 1-hydroxy-N-methylcanadine to noscapine.

[0149] In a further embodiment, there is provided a method of making noscapine comprising:
[0150] (a) providing 1,13-dihydroxy-N-methylcanadine; and
[0151] (b) contacting 1,13-dihydroxy-N-methylcanadine with a mixture comprising catalytic quantities of the enzymes (i) AT1; (ii) CYP82X1; (iii) OMT; (iv) CXE1; and (v) NOS under reaction conditions permitting an enzyme catalyzed chemical conversion of 1,13-dihydroxy-N-methylcanadine to noscapine.

[0152] In a further embodiment, there is provided a method of making noscapine comprising:
[0153] (a) providing 1-hydroxy-13-O-acetyl-N-methylcanadine; and
[0154] (b) contacting 1-hydroxy-13-O-acetyl-N-methylcanadine with a mixture comprising catalytic quantities of the enzymes (i) CYP82X1; (ii) OMT; (iii) CXE1; and (iv) NOS under reaction conditions permitting an enzyme catalyzed chemical conversion of 1-hydroxy-13-O-acetyl-N-methylcanadine to noscapine.

[0155] In a further embodiment, there is provided a method of making noscapine comprising:
[0156] (a) providing 1,8-dihydroxy-13-O-acetyl-N-methylcanadine; and
[0157] (b) contacting 1,8-dihydroxy-13-O-acetyl-N-methylcanadine with a mixture comprising catalytic quantities of the enzymes (i) OMT; (ii) CXE1; and (iii) NOS under reaction conditions permitting an enzyme catalyzed chemical conversion of 1,8-dihydroxy-13-O-acetyl-N-methylcanadine to noscapine.

[0158] In a further embodiment, there is provided a method of making noscapine comprising:
[0159] (a) providing 4′-O-desmethoxy-3-O-acetyl-N-papaveroxine; and
[0160] (b) contacting 4′-O-desmethoxy-3-O-acetyl-N-papaveroxine with a mixture comprising catalytic quantities of the enzymes (i) OMT; (ii) CXE1; and (iii) NOS under reaction conditions permitting an enzyme catalyzed chemical conversion of 4′-O-desmethoxy-3-O-acetyl-N-papaveroxine to noscapine.

[0161] In a further embodiment, there is provided a method of making noscapine comprising:
[0162] (a) providing 3-O-acetyl-N-papaveroxine; and
[0163] (b) contacting 3-O-acetyl-N-papaveroxine with a mixture comprising catalytic quantities of the enzymes (i) CXE1; and (ii) NOS under reaction conditions permitting an enzyme catalyzed chemical conversion of 3-O-acetyl-N-papaveroxine to noscapine.

[0164] In a further embodiment, there is provided a method of making noscapine comprising:
[0165] (a) providing papaveroxine; and
[0166] (b) contacting papaveroxine with a mixture comprising catalytic quantities of the enzyme NOS under reaction conditions permitting an enzyme catalyzed chemical conversion of papaveroxine to noscapine.

[0167] In a further embodiment there is provided a method of making noscapine comprising:
[0168] (a) providing narcotine hemiacetal; and
[0169] (b) contacting narcotine hemiacetal with catalytic quantities of the enzyme NOS under reaction conditions permitting an enzyme catalyzed chemical conversion of narcotine hemiacetal to noscapine.

[0170] The foregoing embodiments of the disclosure to make noscapine are further illustrated in Table A.

[0171] The foregoing reactions may be performed under in vivo or in vitro conditions as hereinafter further detailed.

### Narcotine Hemiacetal Synthesis

[0172] In one embodiment of the disclosure, there is provided a method making narcotine hemiacetal. Accordingly, there is provided a method of making narcotine hemiacetal comprising:
[0173] (a) providing a canadine derivative or a papaveroxine derivative; and
[0174] (b) contacting the canadine derivative, or the papaveroxine derivative with at least one of the enzymes selected from the group of enzymes consisting of (i) CYP82Y1; (ii) CYP82X2; (iii) AT1; (iv) CYP82X1; (v) OMT; and (vi) CXE1 under reaction conditions permitting the catalysis of the canadine derivative or the papaveroxine derivative to form narcotine hemiacetal;

[0175] and wherein the canadine derivative has the chemical formula (I) and the papaveroxine derivative has the chemical formula (III).

[0176] In a further embodiment, there is provided a method of making narcotine hemiacetal comprising:
[0177] (a) providing (S)—N-methylcanadine; and
[0178] (b) contacting (S)—N-methylcanadine with a mixture comprising catalytic quantities of the enzymes (i) CYP82Y1; (ii) CYP82X2; (iii) AT1; (iv) CYP82X1; (v) OMT; and (vi) CXE1 under reaction conditions permitting an enzyme catalyzed chemical conversion of (S)—N-methylcanadine to narcotine hemiacetal.

[0179] In a further embodiment, there is provided a method of making narcotine hemiacetal comprising:
[0180] (a) providing 1-hydroxy-N-methylcanadine; and
[0181] (b) contacting 1-hydroxy-N-methylcanadine with a mixture comprising catalytic quantities of the enzymes (i) CYP82X2; (ii) AT1; (iii) CYP82X1; (iv) OMT; and (v) CXE1 under reaction conditions permitting an enzyme catalyzed chemical conversion of 1-hydroxy-N-methylcanadine to narcotine hemiacetal.

[0182] In a further embodiment, there is provided a method of making narcotine hemiacetal comprising:
[0183] (a) providing 1,13-dihydroxy-N-methylcanadine; and
[0184] (b) contacting 1,13-dihydroxy-N-methylcanadine with a mixture comprising catalytic quantities of the enzymes (i) AT1; (ii) CYP82X1; (iii) OMT; and (iv) CXE1 under reaction conditions permitting an enzyme catalyzed chemical conversion of 1,13-dihydroxy-N-methylcanadine to narcotine hemiacetal.

[0185] In a further embodiment, there is provided a method of making narcotine hemiacetal comprising:
[0186] (a) providing 1-hydroxy-13-O-acetyl-N-methylcanadine; and
[0187] (b) contacting 1-hydroxy-13-O-acetyl-N-methylcanadine with a mixture comprising catalytic quantities of the enzymes (i) CYP82X1; (ii) OMT; and (iii) CXE1 under reaction conditions permitting an enzyme catalyzed chemical conversion of 1-hydroxy-13-O-acetyl-N-methylcanadine to narcotine hemiacetal.

[0188] In a further embodiment, there is provided a method of making narcotine hemiacetal comprising:
[0189] (a) providing 1,8-dihydroxy-13-O-acetyl-N-methylcanadine; and
[0190] (b) contacting 1,8-dihydroxy-13-O-acetyl-N-methylcanadine with a mixture comprising catalytic quantities of the enzymes (i) OMT and (ii) CXE1 under reaction conditions permitting an enzyme catalyzed chemical conversion of 1,8-dihydroxy-13-O-acetyl-N-methylcanadine to narcotine hemiacetal.

[0191] In a further embodiment, there is provided a method of making narcotine hemiacetal comprising:
[0192] (a) providing 4′-O-desmethoxy-3-O-acetyl-N-papaveroxine; and
[0193] (b) contacting 4′-O-desmethoxy-3-O-acetyl-N-papaveroxine with a mixture comprising catalytic quantities of the enzymes (i) OMT and (ii) CXE1 under reaction conditions permitting an enzyme catalyzed chemical conversion of 4′-O-desmethoxy-3-O-acetyl-N-papaveroxine to narcotine hemiacetal.

[0194] In a further embodiment, there is provided a method of making narcotine hemiacetal comprising:
[0195] (a) providing 3-O-acetyl-N-papaveroxine; and
[0196] (b) contacting 3-O-acetyl-N-papaveroxine with catalytic quantities of the enzyme CXE1 under reaction conditions permitting an enzyme catalyzed chemical conversion of 3-O-acetyl-N-papaveroxine to narcotine hemiacetal.

[0197] In a further embodiment, there is provided a method of making narcotine hemiacetal comprising:

[0198] providing papaveroxine under reaction conditions permitting a spontaneous chemical conversion of papaveroxine to narcotine hemiacetal.

[0199] The foregoing embodiments of the disclosure to make narcotine hemiacetal are further illustrated in Table B.

[0200] The foregoing reactions may be performed under in vivo or in vitro conditions as hereinafter further detailed.

### Papaveroxine Synthesis

[0201] In one embodiment of the disclosure there is provided a method making papaveroxine. Accordingly, there is provided a method of making papaveroxine comprising:
[0202] (a) providing a canadine derivative or a papaveroxine derivative; and
[0203] (b) contacting the canadine derivative, or the papaveroxine derivative with at least one of the enzymes selected from the group of enzymes consisting of (i) CYP82Y1; (ii) CYP82X2; (iii) AT1; (iv) CYP82X1; (v) OMT; and (vi) CXE1 under reaction conditions permitting the catalysis of the canadine derivative or the papaveroxine derivative to form papaveroxine;

[0204] and wherein the canadine derivative has the chemical formula (I) and the papaveroxine derivative has the chemical formula (IV)

[chemical structure]

[0205] wherein R₈ represents hydroxyl or methoxy; and

[0206] wherein R₉ represents O-acetyl.

[0207] In a further embodiment, there is provided a method of making papaveroxine comprising:
[0208] (a) providing (S)—N-methylcanadine; and
[0209] (b) contacting (S)—N-methylcanadine with a mixture comprising catalytic quantities of the enzymes (i) CYP82Y1; (ii) CYP82X2; (iii) AT1; (iv) CYP82X1; (v) OMT; and (vi) CXE1 under reaction conditions permitting an enzyme catalyzed chemical conversion of (S)—N-methylcanadine to papaveroxine.

[0210] In a further embodiment, there is provided a method of making papaveroxine comprising:
[0211] (a) providing 1-hydroxy-N-methylcanadine; and
[0212] (b) contacting 1-hydroxy-N-methylcanadine with a mixture comprising catalytic quantities of the enzymes (i) CYP82X2; (ii) AT1; (iii) CYP82X1; (iv) OMT; and (v) CXE1 under reaction conditions permitting an enzyme catalyzed chemical conversion of 1-hydroxy-N-methylcanadine to papaveroxine.

[0213] In a further embodiment, there is provided a method of making papaveroxine comprising:
[0214] (a) providing 1,13-dihydroxy-N-methylcanadine; and
[0215] (b) contacting 1,13-dihydroxy-N-methylcanadine with a mixture comprising catalytic quantities of the enzymes (i) AT1; (ii) CYP82X1; (iii) OMT; and (iv) CXE1 under reaction conditions permitting an enzyme catalyzed chemical conversion of 1,13-dihydroxy-N-methylcanadine to papaveroxine.

[0216] In a further embodiment, there is provided a method of making papaveroxine comprising:
[0217] (a) providing 1-hydroxy-13-O-acetyl-N-methylcanadine; and
[0218] (b) contacting 1-hydroxy-13-O-acetyl-N-methylcanadine with a mixture comprising catalytic quantities of the enzymes (i) CYP82X1; (ii) OMT; and (iii) CXE1 under reaction conditions permitting an enzyme catalyzed chemical conversion of 1-hydroxy-13-O-acetyl-N-methylcanadine to papaveroxine.

[0219] In a further embodiment, there is provided a method of making papaveroxine comprising:
[0220] (a) providing 1,8-dihydroxy-13-O-acetyl-N-methylcanadine; and
[0221] (b) contacting 1,8-dihydroxy-13-O-acetyl-N-methylcanadine with a mixture comprising catalytic quantities of the enzymes (i) OMT and (ii) CXE1 under reaction conditions permitting an enzyme catalyzed chemical conversion of 1,8-dihydroxy-13-O-acetyl-N-methylcanadine to papaveroxine.

[0222] In a further embodiment, there is provided a method of making papaveroxine comprising:
[0223] (a) providing 4′-O-desmethoxy-3-O-acetyl-N-papaveroxine; and
[0224] (b) contacting 4′-O-desmethoxy-3-O-acetyl-N-papaveroxine with a mixture comprising catalytic quantities of the enzymes (i) OMT and (ii) CXE1 under reaction conditions permitting an enzyme catalyzed chemical conversion of 4′-O-desmethoxy-3-O-acetyl-N-papaveroxine to papaveroxine.

[0225] In a further embodiment, there is provided a method of making papaveroxine comprising:
[0226] (a) providing 3-O-acetyl-N-papaveroxine; and
[0227] (b) contacting 3-O-acetyl-N-papaveroxine with catalytic quantities of the enzyme CXE1 under reaction conditions permitting an enzyme catalyzed chemical conversion of 3-O-acetyl-N-papaveroxine to papaveroxine.

[0228] The foregoing embodiments of the disclosure to make narcotine hemiacetal are further illustrated in Table C.

[0229] The foregoing reactions may be performed under in vivo or in vitro conditions as hereinafter further detailed.

### 3-O-Acetylpapaveroxine Synthesis

[0230] In one embodiment of the disclosure there is provided a method making 3-O-acetyl-papaveroxine. Accordingly, there is provided a method of making 3-O-acetyl-papaveroxine comprising:
[0231] (a) providing a canadine derivative or 4′-O-desmethoxy-3-O-acetylpapaveroxine; and
[0232] (b) contacting the canadine derivative, or 4′-O-desmethoxy-3-O-acetylpapaveroxine with at least one of the enzymes selected from the group of enzymes consisting of (i) CYP82Y1; (ii) CYP82X2; (iii) AT1; (iv) CYP82X1; and (v) OMT under reaction conditions permitting the catalysis of the canadine derivative or 4′-O-desmethoxy-3-O-acetylpapaveroxine to form 3-O-acetyl-papaveroxine;

[0233] wherein the canadine derivative has the chemical formula (I).

[0234] In a further embodiment there is provided a method of making 3-O-acetyl-papaveroxine comprising:
[0235] (a) providing (S)—N-methylcanadine; and
[0236] (b) contacting (S)—N-methylcanadine with a mixture comprising catalytic quantities of the enzymes (i) CYP82Y1; (ii) CYP82X2; (iii) AT1; (iv) CYP82X1; and (v) OMT under reaction conditions permitting an enzyme catalyzed chemical conversion of (S)—N-methylcanadine to 3-O-acetyl-papaveroxine.

[0237] In a further embodiment, there is provided a method of making 3-O-acetyl-papaveroxine comprising:
[0238] (a) providing 1-hydroxy-N-methylcanadine; and
[0239] (b) contacting 1-hydroxy-N-methylcanadine with a mixture comprising catalytic quantities of the enzymes (i) CYP82X2; (ii) AT1; (iii) CYP82X1 and (iv) OMT under reaction conditions permitting an enzyme catalyzed chemical conversion of 1-hydroxy-N-methylcanadine to 3-O-acetyl-papaveroxine.

[0240] In a further embodiment, there is provided a method of making 3-O-acetyl-papaveroxine comprising:
[0241] (a) providing 1,13-dihydroxy-N-methylcanadine; and
[0242] (b) contacting 1,13-dihydroxy-N-methylcanadine with a mixture comprising catalytic quantities of the enzymes (i) AT1; (ii) CYP82X1; and (iii) OMT under reaction conditions permitting an enzyme catalyzed chemical conversion of 1,13-dihydroxy-N-methylcanadine to 3-O-acetyl-papaveroxine.

[0243] In a further embodiment, there is provided a method of making 3-O-acetyl-papaveroxine comprising:
[0244] (a) providing 1-hydroxy-13-O-acetyl-N-methylcanadine; and
[0245] (b) contacting 1-hydroxy-13-O-acetyl-N-methylcanadine with a mixture comprising catalytic quantities of the enzymes (i) CYP82X1 and (ii) OMT under reaction conditions permitting an enzyme catalyzed chemical conversion of 1-hydroxy-13-O-acetyl-N-methylcanadine to 3-O-acetyl-papaveroxine.

[0246] In a further embodiment, there is provided a method of making 3-O-acetyl-papaveroxine comprising:
[0247] (a) providing 1,8-dihydroxy-13-O-acetyl-N-methylcanadine; and
[0248] (b) contacting 1,8-dihydroxy-13-O-acetyl-N-methylcanadine with a mixture comprising catalytic quantities of the enzyme OMT under reaction conditions permitting an enzyme catalyzed chemical conversion of 1,8-dihydroxy-13-O-acetyl-N-methylcanadine to 3-O-acetyl-papaveroxine.

[0249] In a further embodiment, there is provided a method of making 3-O-acetyl-papaveroxine comprising:
[0250] (a) providing 4′-O-desmethoxy-3-O-acetyl-N-papaveroxine; and
[0251] (b) contacting 4′-O-desmethoxy-3-O-acetyl-N-papaveroxine with catalytic quantities of the enzyme OMT and under reaction conditions permitting an enzyme catalyzed chemical conversion of 4′-O-desmethoxy-3-O-acetyl-N-papaveroxine to 3-O-acetylpapaveroxine.

[0252] The foregoing embodiments of the disclosure to make 3-O-acetyl-papaveroxine are further illustrated in Table D.

[0253] The foregoing reactions may be performed under in vivo or in vitro conditions as hereinafter further detailed.

### 4′-O-Desmethoxy-3-O-Acetylpapaveroxine Synthesis

[0254] In one embodiment of the disclosure there is provided a method making 4′-O-desmethoxy-3-O-acetylpapaveroxine. Accordingly, there is provided a method of making 4′-O-desmethoxy-3-O-acetylpapaveroxine comprising:
[0255] (a) providing a canadine derivative; and
[0256] (b) contacting the canadine derivative with at least one of the enzymes selected from the group of enzymes consisting of (i) CYP82Y1; (ii) CYP82X2; (iii) AT1; and (iv) CYP82X1 under reaction conditions permitting the catalysis of the canadine derivative to form 4′-O-desmethoxy-3-O-acetylpapaveroxine;

[0257] and wherein the canadine derivative has the chemical formula (I).

[0258] In a further embodiment, there is provided a method of making 4′-O-desmethoxy-3-O-acetylpapaveroxine comprising:
[0259] (a) providing (S)—N-methylcanadine; and
[0260] (b) contacting (S)—N-methylcanadine with a mixture comprising catalytic quantities of the enzymes (i) CYP82Y1; (ii) CYP82X2; (iii) AT1; and (iv) CYP82X1 under reaction conditions permitting an enzyme catalyzed chemical conversion of (S)—N-methylcanadine to 4′-O-desmethoxy-3-O-acetylpapaveroxine.

[0261] In a further embodiment, there is provided a method of making 4′-O-desmethoxy-3-O-acetylpapaveroxine comprising:
[0262] (a) providing 1-hydroxy-N-methylcanadine; and
[0263] (b) contacting 1-hydroxy-N-methylcanadine with a mixture comprising catalytic quantities of the enzymes (i) CYP82X2; (ii) AT1; and (iii) CYP82X1 under reaction conditions permitting an enzyme catalyzed chemical conversion of 1-hydroxy-N-methylcanadine to 4′-O-desmethoxy-3-O-acetylpapaveroxine.

[0264] In a further embodiment, there is provided a method of making 4′-O-desmethoxy-3-O-acetylpapaveroxine comprising:
[0265] (a) providing 1,13-dihydroxy-N-methylcanadine; and
[0266] (b) contacting 1,13-dihydroxy-N-methylcanadine with a mixture comprising catalytic quantities of the enzymes (i) AT1; and (ii) CYP82X1; under reaction conditions permitting an enzyme catalyzed chemical conversion of 1,13-dihydroxy-N-methylcanadine to 4′-O-desmethoxy-3-O-acetylpapaveroxine.

[0267] In a further embodiment, there is provided a method of making 4′-O-desmethoxy-3-O-acetylpapaveroxine comprising:
[0268] (a) providing 1-hydroxy-13-O-acetyl-N-methylcanadine; and
[0269] (b) contacting 1-hydroxy-13-O-acetyl-N-methylcanadine with a mixture comprising catalytic quantities of the enzyme CYP82X1 under reaction conditions permitting an enzyme catalyzed chemical conversion of 1-hydroxy-13-O-acetyl-N-methylcanadine to 4′-O-desmethoxy-3-O-acetylpapaveroxine.

[0270] In a further embodiment, there is provided a method of making 4′-O-desmethoxy-3-O-acetyl-papaveroxine comprising:

[0271] providing 1,8-dihydroxy-13-O-acetyl-N-methyl-canadine under reaction conditions permitting a spontaneous chemical conversion of 1,8-dihydroxy-13-O-acetyl-N-methyl-canadine to 4′-O-desmethoxy-3-O-acetyl-papaveroxine.

[0272] The foregoing embodiments of the present disclosure to make 4′-O-desmethoxy-3-O-papaveroxine are further illustrated in Table E.

[0273] The foregoing reactions may be performed under in vivo or in vitro conditions as hereinafter further detailed.

### 1,8-Dihydroxy-13-O-Acetyl-N-Methylcanadine Synthesis

[0274] In one embodiment of the disclosure there is provided a method making 1,8-dihydroxy-13-O-acetyl-N-methylcanadine. Accordingly, there is provided a method of making 1,8-dihydroxy-13-O-acetyl-N-methylcanadine comprising:
[0275] (a) providing a canadine derivative; and
[0276] (b) contacting the canadine derivative with at least one of the enzymes selected from the group of enzymes consisting of (i) CYP82Y1; (ii) CYP82X2; (iii) AT1; and (iv) CYP82X1 under reaction conditions permitting the catalysis of the canadine derivative to form 1,8-dihydroxy-13-O-acetyl-N-methylcanadine;

[0277] and wherein the canadine derivative has the chemical formula (V):

[chemical structure]

[0278] wherein R₁₀ represents a hydrogen atom, hydroxyl; or O-acetyl;

[0279] wherein R₁₁ represents a hydrogen atom; and

[0280] wherein R₁₂ represents a hydrogen atom or hydroxyl.

[0281] In a further embodiment there is provided a method of making 1,8-dihydroxy-13-O-acetyl-N-methylcanadine comprising:
[0282] (a) providing (S)—N-methylcanadine; and
[0283] (b) contacting (S)—N-methylcanadine with a mixture comprising catalytic quantities of the enzymes (i) CYP82Y1; (ii) CYP82X2; (iii) AT1; and (iv) CYP82X1 under reaction conditions permitting an enzyme catalyzed chemical conversion of (S)—N-methylcanadine to 1,8-dihydroxy-13-O-acetyl-N-methylcanadine.

[0284] In a further embodiment, there is provided a method of making 1,8-dihydroxy-13-O-acetyl-N-methylcanadine comprising:
[0285] (a) providing 1-hydroxy-N-methylcanadine; and
[0286] (b) contacting 1-hydroxy-N-methylcanadine with a mixture comprising catalytic quantities of the enzymes (i) CYP82X2; (ii) AT1; and (iii) CYP82X1 under reaction conditions permitting an enzyme catalyzed chemical conversion of 1-hydroxy-N-methyl-canadine to 1,8-dihydroxy-13-O-acetyl-N-methylcanadine.

[0287] In a further embodiment, there is provided a method of making 1,8-dihydroxy-13-O-acetyl-N-methylcanadine comprising:
[0288] (a) providing 1,13-dihydroxy-N-methylcanadine; and
[0289] (b) contacting 1,13-dihydroxy-N-methylcanadine with a mixture comprising catalytic quantities of the enzymes (i) AT1; and (ii) CYP82X1; under reaction conditions permitting an enzyme catalyzed chemical conversion of 1,13-dihydroxy-N-methylcanadine to 1,8-dihydroxy-13-O-acetyl-N-methylcanadine.

[0290] In a further embodiment, there is provided a method of making 1,8-dihydroxy-13-O-acetyl-N-methylcanadine comprising:
[0291] (a) providing 1-hydroxy-13-O-acetyl-N-methylcanadine; and
[0292] (b) contacting 1-hydroxy-13-O-acetyl-N-methylcanadine with catalytic quantities of the enzyme CYP82X1 under reaction conditions permitting an enzyme catalyzed chemical conversion of 1-hydroxy-13-O-acetyl-N-methylcanadine to 1,8-dihydroxy-13-O-acetyl-N-methylcanadine.

[0293] The foregoing embodiments of the present disclosure to make 1,8-dihydroxy-13-O-acetyl-N-methylcanadine are further illustrated in Table F.

[0294] The foregoing reactions may be performed under in vivo or in vitro conditions as hereinafter further detailed.

### 1-Hydroxy-13-O-Acetyl-N-Methylcanadine Synthesis

[0295] In one embodiment of the disclosure there is provided a method making 1-hydroxy-13-O-acetyl-N-methylcanadine. Accordingly there is provided a method of making 1-hydroxy-13-O-acetyl-N-methylcanadine comprising:
[0296] (a) providing a canadine derivative; and
[0297] (b) contacting the canadine derivative with at least one of the enzymes selected from the group of enzymes consisting of (i) CYP82Y1; (ii) CYP82X2; and (iii) AT1 under reaction conditions permitting the catalysis of the canadine derivative to form 1-hydroxy-13-O-acetyl-N-methylcanadine;

[0298] and wherein the canadine derivative has the chemical formula (VI):

[chemical structure]

[0299] wherein R₁₃ represents a hydrogen atom or hydroxyl;

[0300] wherein R₁₄ represents a hydrogen atom; and

[0301] wherein R₁₅ represents a hydrogen atom or hydroxyl.

[0302] In a further embodiment there is provided a method of making 1-hydroxy-13-O-acetyl-N-methylcanadine comprising:
[0303] (a) providing (S)—N-methylcanadine; and
[0304] (b) contacting (S)—N-methylcanadine with a mixture comprising catalytic quantities of the enzymes (i) CYP82Y1; (ii) CYP82X2; and (iii) AT1 under reaction conditions permitting an enzyme catalyzed chemical conversion of (S)—N-methylcanadine to 1-hydroxy-13-O-acetyl-N-methylcanadine.

[0305] In a further embodiment there is provided a method of making 1-hydroxy-13-O-acetyl-N-methylcanadine comprising:
[0306] (a) providing 1-hydroxy-N-methylcanadine; and
[0307] (b) contacting 1-hydroxy-N-methylcanadine with a mixture comprising catalytic quantities of the enzymes (i) CYP82X2 and (ii) AT1 under reaction conditions permitting an enzyme catalyzed chemical conversion of 1-hydroxy-N-methyl-canadine to 1-hydroxy-13-O-acetyl-N-methylcanadine.

[0308] In a further embodiment there is provided a method of making 1-hydroxy-13-O-acetyl-N-methylcanadine comprising:
[0309] (a) providing 1,13-dihydroxy-N-methylcanadine; and
[0310] (b) contacting 1,13-dihydroxy-N-methylcanadine with catalytic quantities of the enzyme AT1 under reaction conditions permitting an enzyme catalyzed chemical conversion of 1,13-dihydroxy-N-methylcanadine to 1-hydroxy-13-O-acetyl-N-methylcanadine.

[0311] The foregoing embodiments of the present disclosure to make 1-hydroxy-13-O-acetyl-N-methylcanadine are further illustrated in Table G.

[0312] The foregoing reactions may be performed under in vivo or in vitro conditions as hereinafter further detailed.

### 1,13-Dihydroxy-N-Methylcanadine Synthesis

[0313] In one embodiment of the disclosure there is provided a method making 1,13-dihydroxy-N-methylcanadine. Accordingly, there is provided a method of making 1,13-dihydroxy-N-methylcanadine comprising:
[0314] (a) providing a canadine derivative; and
[0315] (b) contacting the canadine derivative with at least one of the enzymes selected from the group of enzymes consisting of (i) CYP82Y1 and (ii) CYP82X2 under reaction conditions permitting the catalysis of the canadine derivative to form 1,13-dihydroxy-N-methylcanadine;

[0316] and wherein the canadine derivative has the chemical formula (VII):

[chemical structure]

[0317] wherein R₁₆ represents a hydrogen atom;

[0318] wherein R₁₇ represents a hydrogen atom; and

[0319] wherein R₁₈ represents a hydrogen atom or hydroxyl.

[0320] In a further embodiment there is provided a method of making 1,13-dihydroxy-N-methylcanadine comprising:
[0321] (a) providing (S)—N-methylcanadine; and
[0322] (b) contacting (S)—N-methylcanadine with a mixture comprising catalytic quantities of the enzymes (i) CYP82Y1; and (ii) CYP82X2 under reaction conditions permitting an enzyme catalyzed chemical conversion of (S)—N-methylcanadine to 1,13-dihydroxy-N-methylcanadine.

[0323] In a further embodiment, there is provided a method of making 1,13-dihydroxy-N-methylcanadine comprising:
[0324] (a) providing 1-hydroxy-N-methylcanadine; and
[0325] (b) contacting 1-hydroxy-N-methylcanadine with catalytic quantities of the enzyme CYP82X2 under reaction conditions permitting an enzyme catalyzed chemical conversion of 1-hydroxy-N-methyl-canadine to 1,13-dihydroxy-N-methylcanadine.

[0326] The foregoing embodiments of the present disclosure to make 1-hydroxy-13-O-acetyl-N-methylcanadine are further illustrated in Table H.

[0327] The foregoing reactions may be performed under in vivo or in vitro conditions as hereinafter further detailed.

### 1-Hydroxy-N-Methylcanadine Synthesis

[0328] In one embodiment of the disclosure there is provided a method making 1-hydroxy-N-methylcanadine. Accordingly, there is provided a method of making 1-hydroxy-N-methylcanadine comprising:
[0329] (a) providing (S)—N-methylcanadine; and
[0330] (b) contacting (S)—N-methylcanadine with the enzyme CYP82Y1 under reaction conditions permitting the catalysis of the canadine derivative to form 1-hydroxy-N-methylcanadine;

[0331] In a further embodiment, there is provided a method of making 1-hydroxy-N-methylcanadine comprising:
[0332] (a) providing (S)—N-methylcanadine; and
[0333] (b) contacting (S)—N-methylcanadine with catalytic quantities of the enzymes CYP82Y1 under reaction conditions permitting an enzyme catalyzed chemical conversion of (S)—N-methylcanadine to 1-hydroxy-N-methylcanadine.

[0334] The foregoing embodiments of the present disclosure to make 1-hydroxy-13-O-acetyl-N-methylcanadine are further illustrated in Table I.

[0335] The foregoing reactions may be performed under in vivo or in vitro conditions as hereinafter further detailed.

### Noscapine Synthesis Intermediate Derivatives

[0336] In addition to the noscapine synthesis intermediates shown in FIG. 1, it is noted that in certain embodiments hereof, certain derivatives of the noscapine synthesis intermediates shown in FIG. 1 may also be prepared. Thus, for example, narcotoline hemiacetal and narcotinoline may be prepared by providing CYP82X1, as hereinafter set forth and shown in FIG. 22.

### Narcotoline Hemiacetal Synthesis

[0337] In one embodiment of the disclosure, there is provided a method making narcotinoline hemiacetal. Accordingly, there is provided a method of making narcotinoline hemiacetal comprising:
[0338] (a) providing a canadine derivative; and
[0339] (b) contacting the canadine derivative with at least one of the enzymes selected from the group of enzymes consisting of (i) CYP82Y1; (ii) CYP82X2; (iii) AT1; and (iv) CYP82X1; and, optionally, (v) CXE1 under reaction conditions permitting the catalysis of the canadine derivative to form narcotinoline hemiacetal;

[0340] and wherein the canadine derivative has the chemical formula (I).

[0341] In a further embodiment, there is provided a method of making narcotinoline hemiacetal comprising:
[0342] (a) providing (S)—N-methylcanadine; and
[0343] (b) contacting (S)—N-methylcanadine with a mixture comprising catalytic quantities of the enzymes (i) CYP82Y1; (ii) CYP82X2; (iii) AT1; and (iv) CYP82X1 under reaction conditions permitting an enzyme catalyzed chemical conversion of (S)—N-methylcanadine to narcotinoline hemiacetal.

[0344] In a further embodiment, there is provided a method of making narcotinoline hemiacetal comprising:
[0345] (a) providing 1-hydroxy-N-methylcanadine; and
[0346] (b) contacting 1-hydroxy-N-methylcanadine with a mixture comprising catalytic quantities of the enzymes (i) CYP82X2; (ii) AT1; and (iii) CYP82X1; and, optionally, (iv) CXE1 under reaction conditions permitting an enzyme catalyzed chemical conversion of 1-hydroxy-N-methylcanadine to narcotinoline hemiacetal.

[0347] In a further embodiment, there is provided a method of making narcotinoline hemiacetal comprising:
[0348] (a) providing 1,13-dihydroxy-N-methylcanadine; and
[0349] (b) contacting 1,13-dihydroxy-N-methylcanadine with a mixture comprising catalytic quantities of the enzymes (i) AT1; and (ii) CYP82X1; under reaction conditions permitting an enzyme catalyzed chemical conversion of 1,13-dihydroxy-N-methylcanadine to narcotinoline hemiacetal.

[0350] In a further embodiment, there is provided a method of making narcotinoline hemiacetal comprising:
[0351] (a) providing 1-hydroxy-13-O-acetyl-N-methylcanadine; and
[0352] (b) contacting 1-hydroxy-13-O-acetyl-N-methylcanadine with a mixture comprising catalytic quantities of the enzyme CYP82X1, and, optionally, CXE1, under reaction conditions permitting an enzyme catalyzed chemical conversion of 1-hydroxy-13-O-acetyl-N-methylcanadine to narcotinoline hemiacetal.

[0353] In a further embodiment, there is provided a method of making narcotinoline hemiacetal comprising:
[0354] (a) providing 1-hydroxy-13-O-acetyl-N-methylcanadine; and
[0355] (b) contacting 1-hydroxy-13-O-acetyl-N-methylcanadine with a mixture comprising catalytic quantities of the enzyme CXE1, under reaction conditions permitting an enzyme catalyzed chemical conversion of 1-hydroxy-13-O-acetyl-N-methylcanadine to narcotinoline hemiacetal.

[0356] In a further embodiment, there is provided a method of making narcotinoline hemiacetal comprising:
[0357] (a) providing 4′-desmethoxy-3-O-acetyl-papaveroxine; and
[0358] (b) contacting 4′-desmethoxy-3-O-acetyl-papaveroxine with a mixture comprising catalytic quantities of the enzyme CXE1, under reaction conditions permitting an enzyme catalyzed chemical conversion of 4′-desmethoxy-3-O-acetyl-papaveroxine to narcotinoline hemiacetal.

[0359] In a further embodiment, there is provided a method of making narcotinoline hemiacetal comprising:

[0360] providing 1,8-dihydroxy-13-O-acetyl-N-methyl-canadine under reaction conditions permitting a spontaneous chemical conversion of 1,8-dihydroxy-13-O-acetyl-N-methyl-canadine to narcotinoline hemiacetal.

[0361] In a further embodiment, there is provided a method of making narcotinoline hemiacetal comprising:

[0362] providing 4′-desmethoxy-3-O-acetyl-papaveroxine under reaction conditions permitting a spontaneous chemical conversion of 4′-desmethoxy-3-O-acetyl-papaveroxine to narcotinoline hemiacetal.

[0363] In a further embodiment, there is provided a method of making narcotinoline hemiacetal comprising:

[0364] providing 4-desmethoxy-papaveroxine under reaction conditions permitting a spontaneous chemical conversion of 4′-desmethoxy-3-O-acetyl-papaveroxine canadine to narcotinoline hemiacetal.

[0365] The foregoing embodiments of the present disclosure to make narcotinoline hemiacetal are further illustrated in Table J.

[0366] The foregoing reactions may be performed under in vivo or in vitro conditions as hereinafter further detailed.

### Narcotinoline Synthesis

[0367] In another embodiment hereof, narcotinoline hemiacetal in the presence of NOS may be converted to narcotinoline (as shown in FIG. 22).

[0368] In one embodiment of the disclosure, there is provided a method making narcotinoline. Accordingly, there is provided a method of making narcotoline comprising:
[0369] (a) providing a canadine derivative; and
[0370] (b) contacting the canadine derivative with at least one of the enzymes selected from the group of enzymes consisting of (i) CYP82Y1; (ii) CYP82X2; (iii) AT1; (iv) CYP82X1 and (v) NOS; and (vi), optionally, CXE1, under reaction conditions permitting the catalysis of the canadine derivative to form narcotinoline;

[0371] and wherein the canadine derivative has the chemical formula (I).

[0372] In a further embodiment, there is provided a method of making narcotinoline comprising:
[0373] (a) providing (S)—N-methylcanadine; and
[0374] (b) contacting (S)—N-methylcanadine with a mixture comprising catalytic quantities of the enzymes (i) CYP82Y1; (ii) CYP82X2; (iii) AT1; (iv) CYP82X1 and (v) NOS; and (vi), optionally, CXE1, under reaction conditions permitting an enzyme catalyzed chemical conversion of (S)—N-methylcanadine to narcotinoline.

[0375] In a further embodiment, there is provided a method of making narcotinoline comprising:
[0376] (a) providing 1-hydroxy-N-methylcanadine; and
[0377] (b) contacting 1-hydroxy-N-methylcanadine with a mixture comprising catalytic quantities of the enzymes (i) CYP82X2; (ii) AT1; and (iii) CYP82X1 and (iv) NOS; and (v), optionally, CXE1, under reaction conditions permitting an enzyme catalyzed chemical conversion of 1-hydroxy-N-methylcanadine to narcotinoline.

[0378] In a further embodiment, there is provided a method of making narcotinoline comprising:
[0379] (a) providing 1,13-dihydroxy-N-methylcanadine; and
[0380] (b) contacting 1,13-dihydroxy-N-methylcanadine with a mixture comprising catalytic quantities of the enzymes (i) AT1; and (ii) CYP82X1 and (iii) NOS; and (iv), optionally, CXE1, under reaction conditions permitting an enzyme catalyzed chemical conversion of 1,13-dihydroxy-N-methylcanadine to narcotinoline.

[0381] In a further embodiment, there is provided a method of making narcotinoline comprising:
[0382] (a) providing 1-hydroxy-13-O-acetyl-N-methylcanadine; and
[0383] (b) contacting 1-hydroxy-13-O-acetyl-N-methylcanadine with a mixture comprising catalytic quantities of the enzymes (i) CYP82X1 and (ii) NOS; and (iii), optionally, CXE1, under reaction conditions permitting an enzyme catalyzed chemical conversion of 1-hydroxy-13-O-acetyl-N-methylcanadine to narcotinoline.

[0384] In a further embodiment, there is provided a method of making narcotinoline comprising:
[0385] (a) providing 1,8-dihydroxy-13-O-acetyl-N-methylcanadine; and
[0386] (b) contacting 1,8-dihydroxy-13-O-acetyl-N-methylcanadine with a mixture comprising catalytic quantities of NOS and, optionally, CXE1, under reaction conditions permitting an enzyme catalyzed chemical conversion of 1,8-dihydroxy-13-O-acetyl-N-methylcanadine to narcotinoline.

[0387] In a further embodiment, there is provided a method of making narcotinoline comprising:
[0388] (a) providing 4′-desmethoxy-3-O-acetylpapaveroxine; and
[0389] (b) contacting 4′-desmethoxy-3-O-acetylpapaveroxine with a mixture comprising catalytic quantities of NOS and, optionally, CXE1, under reaction conditions permitting an enzyme catalyzed chemical conversion of 4′-desmethoxy-3-O-acetylpapaveroxine to narcotinoline.

[0390] In a further embodiment, there is provided a method of making narcotinoline comprising:
[0391] (a) providing 4′desmethoxy papaveroxine; and
[0392] (b) contacting 4′-desmethoxy-3-O-acetylpapaveroxine with a mixture comprising catalytic quantities of NOS under reaction conditions permitting an enzyme catalyzed chemical conversion of 4′-desmethoxy-3-O-acetylpapaveroxine to narcotinoline.

[0393] The foregoing embodiments of the present disclosure to make narcotinoline are further illustrated in Table K.

[0394] The foregoing reactions may be performed under in vivo or in vitro conditions as hereinafter further detailed.

### In Vitro Synthesis of Noscapine, Noscapine Synthesis Intermediates and Noscapine Synthesis Intermediate Derivatives

[0395] In accordance with certain aspects of the present disclosure, noscapine synthesis intermediates or noscapine synthesis intermediate derivatives are brought in contact with catalytic quantities of one or more of the enzymes CYP82Y1; CYP82X2; AT1; CYP82X1; OMT; CXE1 and NOS under reaction conditions permitting an enzyme catalyzed chemical conversion of the noscapine synthesis intermediates or noscapine synthesis intermediate derivatives under in vitro reaction conditions. Under such in vitro reaction conditions the initial reaction constituents are provided in more or less pure form and are mixed under conditions that permit the requisite chemical reactions to substantially proceed. Substantially pure forms of the initial noscapine synthesis intermediates or noscapine synthesis intermediate derivatives may be chemically synthesized or, preferably, are isolated from natural sources including, Papaver somniferum. Other plant species that may be used in accordance herewith to obtain noscapine synthesis intermediate include, without limitation, plant species belonging to the plant families of Eupteleaceae, Lardizabalaceae, Circaeasteraceae, Menispermaceae, Berberidaceae, Ranunculaceae, and Papaveraceae (including those belonging to the subfamilies of Pteridophylloideae, Papaveroideae and Fumarioideae) and further includes plants belonging to the genus Argemone, including Argemone mexicana (Mexican Prickly Poppy), plants belonging to the genus Berberis, including Berberis thunbergii (Japanese Barberry), plants belonging to the genus Chelidonium, including Chelidonium majus (Greater Celandine), plants belonging to the genus Cissampelos, including Cissampelos mucronate (Abuta), plants belonging to the genus Cocculus, including Cocculus trilobus (Korean Moonseed), plants belonging to the genus Corydalis, including Corydalis chelanthifolia (Ferny Fumewort), Corydalis cava; Corydalis ochotenis; Corydalis ophiocarpa; Corydalis platycarpa; Corydalis tuberosa and Cordyalis bulbosa, plants belonging to the genus Eschscholzia, including Eschscholzia californica (California Poppy), plants belonging to the genus Glaucium, including Glaucium flavum (Yellowhorn Poppy), plants belonging to the genus Hydrastis, including Hydrastis canadensis (Goldenseal), plants belonging to the genus Jeffersonia, including Jeffersonia diphylla (Rheumatism Root), plants belonging to the genus Mahonia, including Mahonia aquifolium (Oregon Grape), plants belonging to the genus Menispermum, including Menispermum canadense (Canadian Moonseed), plants belonging to the genus Nandina, including Nandina domestica (Sacred Bamboo), plants belonging to the genus Nigella, including Nigella sativa (Black Cumin), plants belonging to the genus Papaver, including Papaver armeniacum, Papaver bracteatum (Persian Poppy), Papaver somniferum, Papaver cylindricum, Papaver decaisnei, Papaver fugax, Papaver oreophyllum, Papaver orientale, Papaver paeonifolium, Papaver persicum, Papaver pseudo-orientale, Papaver rhoeas, Papaver rhopalothece, Papaver setigerum, Papaver tauricolum, and Papaver triniaefolium, plants belonging to the genus Sanguinaria, including Sanguinaria canadensis (Bloodroot), plants belonging to the genus Stylophorum, including Stylophorum diphyllum (Celandine Poppy), plants belonging to the genus Thalictrum, including Thalictrum flavum (Meadow Rue), plants belonging to the genus Tinospora, including Tinospora cordifolia (Heartleaf Moonseed), plants belonging to the genus Xanthoriza, including Xanthoriza simplicissima (Yellowroot) and plants belonging to the genus Romeria including Romeria carica. The aforementioned plants may be able to produce noscapine synthesis intermediates, including, but not limited to 3-O-acetyl-papaveroxine, which may be obtained from the species selected from the group of species including, without limitation, Papaver fugax; Papaver pseudo-orient and Papaver somniferum; and, narcotine-hemiacetal, which may be obtained from the species selected from the group of species including, without limitation, Papaver fugax; Papaver pseudo-orient and Papaver somniferum. Chemical synthesis may be performed by direct condensation between cotarnine and meconine, or related methods using cotarnine intermediate. Alternatively, total synthesis of (+/−)-α-noscapine is achieved using blocking group-directed Bischler-Napieralski cyclization, followed with diastereoselective reduction. Initial synthesis and resolution of (dl)-noscapine, previously called gnoscapine or (dl)-narcotine, was reported by Perkin and Robinson (1911, J. Chem. Soc. Trans. 99: 775-792). Subsequent reports detailed the individual chemical syntheses of noscapine isomers, including both α and β configurations (Gorecki and Bognár 1968, Pharmazie 23:590-593; von Gaal and Bognár 1971, Journal für practische chemie 313: 935-939; Kerkekes and Bognár 1971, Journal für practische chemie 313: 923-934; Varga et al. 1991, Acta Chimica Hungarica: Models in Chemistry 138: 831-837). Recently, blocking group-directed diastereoselective total synthesis of (+/−)-α-noscapine was reported (Ni et al. 2011, Tetrahedron 67: 5162-5167). Chemical semi-syntheses of noscapine analogues, or “noscapinoids,” have employed noscapine as a starting material. For example, folate conjugated noscapine (Targetin) (Naik et al. 2012, Journal of Computer Aided Molecular Design 26: 233-247.), aminated noscapinoids (Anderson et al. 2005, Journal of Medicinal Chemistry 48: 7096-7098.), benzofuranone ring—(Mishra et al. 2011, Biochemical Pharmacology 82: 110-121) and isoquinoline ring-substituted analogues (Aneja et al. 2006, Bioorganic and Medicinal Chemistry 14: 8352-8358; and Aggarwal et al. 2002 Helvetica Chimica Acta 85: 2458-2462).

[0396] In accordance herewith, more or less pure forms of the enzymes may be isolated from natural sources, including Papaver somniferum, or they may be prepared recombinantly. Thus, provided herein is further a method for preparing an enzyme selected from the group of enzymes consisting of CYP82Y1; CYP82X2; AT1; CYP82X1; OMT; CXE1 and NOS comprising:
[0397] (a) providing a chimeric nucleic acid sequence comprising in the 5′ to 3′ direction of transcription as operably linked components:
   [0398] (i) one or more nucleic acid sequences encoding one or more of the polypeptides selected from the group of polypeptides consisting of CYP82Y1; CYP82X2; AT1; CYP82X1; OMT; CXE1 and NOS; and
   [0399] (ii) one or more nucleic acid sequences capable of controlling expression in a host cell;
[0400] (b) introducing the chimeric nucleic acid sequence into a host cell and growing the host cell to produce the polypeptide selected from the group of polypeptides consisting of CYP82Y1; CYP82X2; AT1; CYP82X1; OMT; CXE1 and/or NOS; and
[0401] (c) recovering CYP82Y1; CYP82X2; AT1; CYP82X1; OMT; CXE1 and NOS from the host cell.

[0402] In preferred embodiments the enzymes are polypeptides having a polypeptide sequence represented by SEQ.ID. NO.2; SEQ.ID. NO.4; SEQ.ID. NO.6; SEQ.ID. NO.8; SEQ.ID. NO.10; and SEQ.ID. NO.12.

[0403] Growth of the host cells leads to production of the CYP82Y1; CYP82X2; AT1; CYP82X1; OMT; CXE1 and/or NOS polypeptides. The polypeptides subsequently may be recovered, isolated and separated from other host cell components by a variety of different protein purification techniques including, e.g. ion-exchange chromatography, size exclusion chromatography, affinity chromatography, hydrophobic interaction chromatography, reverse phase chromatography, gel filtration, etc. Further general guidance with respect to protein purification may for example be found in: Cutler, P. Protein Purification Protocols, Humana Press, 2004, Second Ed. Thus substantially pure preparations of the CYP82Y1; CYP82X2; AT1; CYP82X1; OMT; CXE1 and/or NOS polypeptides may be obtained. Combinations of polypeptides may be selected in accordance with Tables A-K, and any and all of the combinations of the enzymes set forth in Tables A-K are specifically included herein.

[0404] In accordance herewith, noscapine synthesis intermediates or noscapine synthesis intermediate derivatives are brought in contact with catalytic quantities of one or more of the enzymes CYP82Y1; CYP82X2; AT1; CYP82X1; OMT; CXE1 and NOS under reaction conditions permitting an enzyme catalyzed chemical conversion of the noscapine synthesis intermediates or noscapine synthesis intermediate derivatives. In preferred embodiments, the agents are brought in contact with each other and mixed to form a mixture. In preferred embodiments the mixture is an aqueous mixture comprising water and further optionally additional agents to facilitate enzyme catalysis, including buffering agents, salts, pH modifying agents, as well as co-factors, for example NAD+ and NADP+. The reaction may be performed at a range of different temperatures. In preferred embodiments the reaction is performed at a temperature between about 18° C. and 37° C. It is furthermore noted that in certain instances where a reaction is proceeding spontaneously, as noted in FIG. 1 and FIG. 22, further optional additional agents include enzymes. Specifically it is noted that in accordance with the present disclosure, in order to facilitate conversion of 4′-desmethoxy-3-O-acetylpapaveroxine to 4′-desmethoxy-papaveroxine, the enzyme CXE1 may be included in the reaction mixture. Upon completion of the in vitro reaction noscapine or the noscapine synthesis intermediates or noscapine synthesis intermediate derivatives may be obtained in more or less pure form. It will be understood by those of skill in the art that the quantities of the secondary metabolites that are obtained may vary, and that depending on the exact reaction conditions selected, together with noscapine or a desired noscapine pathway precursor, compounds upstream thereof, as well as noscapine intermediate synthesis derivatives, may be obtained. In general, it will be possible to select, through routine optimization, the reaction conditions in such a manner that the presence of noscapine pathway precursor compounds, upstream of noscapine or the desired noscapine pathway precursor compound, or the presence of undesirable derivatives of noscapine synthesis intermediate derivatives is minimized.

### In Vivo Synthesis of Noscapine and Noscapine Synthesis Intermediates and Noscapine Synthesis Intermediate Derivatives

[0405] In accordance with certain aspects of the present disclosure noscapine synthesis intermediates or noscapine synthesis intermediate derivatives are brought in contact with catalytic quantities of one or more of the enzymes CYP82Y1; CYP82X2; AT1; CYP82X1; OMT; CXE1 and NOS under reaction conditions permitting an enzyme catalyzed chemical conversion of the noscapine synthesis intermediates or noscapine synthesis intermediate derivatives under in vivo reaction conditions. Under such in vivo reaction conditions living cells are modified in such a manner that they produce noscapine or the noscapine synthesis intermediates or noscapine synthesis intermediate derivatives. In certain embodiments, the living cells are microorganisms, including bacterial cells and fungal cells. In other embodiments the living cells are multicellular organisms, including plants.

[0406] In one embodiment, the living cells are selected to be host cells capable of producing at least one of the noscapine synthesis intermediates or noscapine synthesis intermediate derivatives of the present disclosure, but are unable to produce noscapine or one or more of noscapine or the other noscapine synthesis intermediates of the present disclosure. Such cells include, without limitation, bacteria, yeast, other fungal cells, plant cells, or animal cells. Thus, by way of example only, a host cell may be a yeast host cell capable of producing S—N-methylcanadine, but not any of 1-hydroxy-N-methylcanadine; 1,13-dihydroxy-N-methylcanadine; 1-hydroxy-O-acetyl-N-methylcanadine; 1,8-dihydroxy-13-O-acetyl-N-methylcanadine; 4′-O-desmethoxy-3-O-acetyl-papaveroxine; 3-O-acetyl-papaveroxine; papaveroxine; narcotine hemiacetal or noscapine. In order to modulate such host cells in such a manner that they produce noscapine or other noscapine synthesis intermediates, one or more of the enzymes selected from the group of enzymes consisting of CYP82Y1; CYP82X2; AT1; CYP82X1′ OMT; CXE1 and NOS in accordance herewith may be heterologously introduced and expressed in the host cells.

[0407] In other embodiments, the living cells naturally produce one or more of the noscapine synthesis intermediates or noscapine synthesis intermediate derivatives or noscapine of the present disclosure, however the living cells are modulated in such a manner that the levels of one or more of the noscapine synthesis intermediates or noscapine synthesis intermediate derivatives or noscapine produced in the cells is modulated, without heterologous introduction of any of the aforementioned enzymes in such living cells.

[0408] In order to produce noscapine or a noscapine synthesis intermediate or a noscapine synthesis intermediate derivative, provided herein is further a method for preparing noscapine and/or one or more of the noscapine synthesis intermediates and/or or noscapine synthesis intermediate derivatives selected from the group of noscapine synthesis intermediates and noscapine synthesis intermediate derivatives consisting of: 1-hydroxy-N-methylcanadine; 1,13-dihydroxy-N-methylcanadine; 1-hydroxy-O-acetyl-N-methylcanadine; 1,8-dihydroxy-13-O-acetyl-N-methylcanadine; 4′-O-desmethoxy-3-O-acetyl-papaveroxine; 3-O-acetyl-papaveroxine; papaveroxine; narcotine hemiacetal; 4′-desmethoxypapaveroxine, narcotinoline hemiacetal and narcotinoline comprising:
[0409] (a) providing a chimeric nucleic acid sequence comprising in the 5′ to 3′ direction of transcription as operably linked components:
   [0410] (i) one or more nucleic acid sequences encoding one or more of the polypeptides selected from the group of polypeptides consisting of CYP82Y1; CYP82X2; AT1; CYP82X1; OMT; CXE1 and NOS; and
   [0411] (ii) one or more nucleic acid sequences capable of controlling expression in a host cell;
[0412] (b) introducing the chimeric nucleic acid sequence into a host cell and growing the host cell to produce the polypeptide selected from the group of polypeptides consisting of CYP82Y1; CYP82X2; AT1; CYP82X1; OMT; CXE1 and/or NOS and to produce one or more of noscapine or one of the noscapine synthesis intermediates; and
[0413] (c) recovering noscapine or a noscapine synthesis intermediate or noscapine synthesis intermediate derivatives.

[0414] In preferred embodiments, the nucleic acid sequences are selected from the nucleic acid sequences set forth herein as one or more of SEQ.ID. NO.1; SEQ.ID. NO.3; SEQ.ID. NO.5; SEQ.ID. NO.7; SEQ.ID. NO.9; and SEQ.ID. NO.11. The hereinbefore mentioned polypeptide or polypeptides are selected in accordance with the specific noscapine synthesis intermediate(s) or noscapine that is desirable to obtain. Thus, by way of non-limiting example, if one wishes to prepare noscapine one may introduce in a host cell capable of producing S—N-methylcanadine, a chimeric nucleic acid sequence into a host cell encoding the polypeptides CYP82Y1; CYP82X2; AT1; CYP82X1; OMT; CXE1 and/or NOS (i.e. a nucleic acid sequence comprising SEQ.ID. NO.1; SEQ.ID. NO.3; SEQ.ID. NO.5; SEQ.ID. NO.7; SEQ.ID. NO.9; and SEQ.ID. NO.11). Further nucleic acid and polypeptides may be obtained from a variety of plant species including, without limitation, plant species belonging to the plant families of Eupteleaceae, Lardizabalaceae, Circaeasteraceae, Menispermaceae, Berberidaceae, Ranunculaceae, and Papaveraceae (including those belonging to the subfamilies of Pteridophylloideae, Papaveroideae and Fumarioideae) and further includes plants belonging to the genus Argemone, including Argemone mexicana (Mexican Prickly Poppy), plants belonging to the genus Berberis, including Berberis thunbergii (Japanese Barberry), plants belonging to the genus Chelidonium, including Chelidonium majus (Greater Celandine), plants belonging to the genus Cissampelos, including Cissampelos mucronate (Abuta), plants belonging to the genus Cocculus, including Cocculus trilobus (Korean Moonseed), plants belonging to the genus Corydalis, including Corydalis chelanthifolia (Ferny Fumewort), Corydalis cava; Corydalis ochotenis; Corydalis ophiocarpa; Corydalis platycarpa; Corydalis tuberosa and Cordyalis bulbosa, plants belonging to the genus Eschscholzia, including Eschscholzia californica (California Poppy), plants belonging to the genus Glaucium, including Glaucium flavum (Yellowhorn Poppy), plants belonging to the genus Hydrastis, including Hydrastis canadensis (Goldenseal), plants belonging to the genus Jeffersonia, including Jeffersonia diphylla (Rheumatism Root), plants belonging to the genus Mahonia, including Mahonia aquifolium (Oregon Grape), plants belonging to the genus Menispermum, including Menispermum canadense (Canadian Moonseed), plants belonging to the genus Nandina, including Nandina domestica (Sacred Bamboo), plants belonging to the genus Nigella, including Nigella sativa (Black Cumin), plants belonging to the genus Papaver, including Papaver armeniacum, Papaver bracteatum (Persian Poppy), Papaver somniferum, Papaver cylindricum, Papaver decaisnei, Papaver fugax, Papaver oreophyllum, Papaver orientale, Papaver paeonifolium, Papaver persicum, Papaver pseudo-orientale, Papaver rhoeas, Papaver rhopalothece, Papaver setigerum, Papaver tauricolum, and Papaver triniaefolium, plants belonging to the genus Sanguinaria, including Sanguinaria canadensis (Bloodroot), plants belonging to the genus Stylophorum, including Stylophorum diphyllum (Celandine Poppy), plants belonging to the genus Thalictrum, including Thalictrum flavum (Meadow Rue), plants belonging to the genus Tinospora, including Tinospora cordifolia (Heartleaf Moonseed), plants belonging to the genus Xanthoriza, including Xanthoriza simplicissima (Yellowroot) and plants belonging to the genus Romeria including Romeria carica. Further specific nucleic acid sequences and polypeptide sequences that may be used in accordance herewith are set forth in Table L and Table M and in SEQ. ID NO: 1-SEQ. ID. NO: 598.

[0415] Further combinations of nucleic acid sequences in order to produce noscapine or noscapine synthesis intermediates or noscapine synthesis intermediate derivatives in accordance herewith may be selected by referring to Tables A-K and any and all of the combinations of nucleic acid sequences encoding the enzymes set forth in Tables A-K are specifically included herein.

[0416] In accordance herewith, the nucleic acid sequence encoding CYP82Y1; CYP82X2; AT1; CYP82X1; OMT; CXE1 and/or NOS is linked to a nucleic acid sequence capable of controlling expression of CYP82Y1; CYP82X2; AT1; CYP82X1; OMT; CXE1 and NOS in a host cell. Accordingly, the present disclosure also provides a nucleic acid sequence encoding CYP82Y1; CYP82X2; AT1; CYP82X1; OMT; CXE1 and NOS linked to a promoter capable of controlling expression in a host cell. Nucleic acid sequences capable of controlling expression in host cells that may be used herein include any transcriptional promoter capable of controlling expression of polypeptides in host cells. Generally, promoters obtained from bacterial cells are used when a bacterial host is selected in accordance herewith, while a fungal promoter will be used when a fungal host is selected, a plant promoter will be used when a plant cell is selected, and so on. Further nucleic acid elements capable elements of controlling expression in a host cell include transcriptional terminators, enhancers and the like, all of which may be included in the chimeric nucleic acid sequences of the present disclosure.

[0417] In accordance with the present disclosure, the chimeric nucleic acid sequences comprising a promoter capable of controlling expression in host cell linked to a nucleic acid sequence encoding CYP82Y1; CYP82X2; AT1; CYP82X1; OMT; CXE1 and NOS, can be integrated into a recombinant expression vector which ensures good expression in the host cell. Accordingly, the present disclosure includes a recombinant expression vector comprising in the 5′ to 3′ direction of transcription as operably linked components:
[0418] (i) a nucleic acid sequence capable of controlling expression in a host cell; and
[0419] (ii) a nucleic acid sequence encoding CYP82Y1; CYP82X2; AT1; CYP82X1; OMT; CXE1 and/or NOS.

[0420] wherein the expression vector is suitable for expression in a host cell. The term “suitable for expression in a host cell” means that the recombinant expression vector comprises the chimeric nucleic acid sequence of the present disclosure linked to genetic elements required to achieve expression in a host cell. Genetic elements that may be included in the expression vector in this regard include a transcriptional termination region, one or more nucleic acid sequences encoding marker genes, one or more origins of replication and the like. In preferred embodiments, the expression vector further comprises genetic elements required for the integration of the vector or a portion thereof in the host cell's genome, for example if a plant host cell is used the T-DNA left and right border sequences which facilitate the integration into the plant's nuclear genome. Further combinations of nucleic acid sequences in order to produce noscapine or noscapine synthesis intermediates in accordance herewith may be selected by referring to Tables A-K.

[0421] Pursuant to the present disclosure the expression vector may further contain a marker gene. Marker genes that may be used in accordance with the present disclosure include all genes that allow the distinction of transformed cells from non-transformed cells, including all selectable and screenable marker genes. A marker gene may be a resistance marker such as an antibiotic resistance marker against, for example, kanamycin or ampicillin. Screenable markers that may be employed to identify transformants through visual inspection include β-glucuronidase (GUS) (U.S. Pat. Nos. 5,268,463 and 5,599,670) and green fluorescent protein (GFP) (Niedz et al., 1995, Plant Cell Rep., 14: 403).

[0422] One host cell that particularly conveniently may be used is Escherichia coli. The preparation of the E. coli vectors may be accomplished using commonly known techniques such as restriction digestion, ligation, gelectrophoresis, DNA sequencing, the Polymerase Chain Reaction (PCR) and other methodologies. A wide variety of cloning vectors is available to perform the necessary steps required to prepare a recombinant expression vector. Among the vectors with a replication system functional in E. coli, are vectors such as pBR322, the pUC series of vectors, the M13 mp series of vectors, pBluescript etc. Typically, these cloning vectors contain a marker allowing selection of transformed cells. Nucleic acid sequences may be introduced in these vectors, and the vectors may be introduced in E. coli by preparing competent cells, electroporation or using other well known methodologies to a person of skill in the art. E. coli may be grown in an appropriate medium, such as Luria-Broth medium and harvested. Recombinant expression vectors may readily be recovered from cells upon harvesting and lysing of the cells. Further, general guidance with respect to the preparation of recombinant vectors and growth of recombinant organisms may be found in, for example: Sambrook et al., Molecular Cloning, a Laboratory Manual, Cold Spring Harbor Laboratory Press, 2001, Third Ed.

[0423] Further included in the present disclosure are a host cell wherein the host cell comprised a chimeric nucleic acid sequence comprising in the 5′ to 3′ direction of transcription as operably linked components one or more nucleic acid sequences encoding one or more of the polypeptides selected from the group of polypeptides consisting of CYP82Y1; CYP82X2; AT1; CYP82X1; OMT; CXE1 and NOS. As hereinbefore mentioned the host cell is preferably a host cell capable of producing at least one of the noscapine synthesis intermediates of the present disclosure, but is unable to produce noscapine or one or more of noscapine or the other noscapine synthesis intermediates of the present disclosure, but for the introduction of the chimeric nucleic acid sequences of the present disclosure. Combinations of nucleic acid sequences in order to produce noscapine or noscapine synthesis intermediates or noscapine synthesis intermediate derivatives in accordance herewith may be selected by referring to Tables A-K and host cells comprising any and all of the combinations of nucleic acid sequences encoding the polypeptides set forth in Tables A-K are specifically included herein.

[0424] As hereinbefore mentioned, in other embodiments, the living cells naturally produce one or more of the noscapine synthesis intermediates or noscapine or noscapine synthesis intermediate derivatives of the present disclosure, however the living cells are modulated in such a manner that the levels of one or more of the noscapine synthesis intermediates or noscapine synthesis intermediate derivatives or noscapine produced in the cells is modulated, without heterologous introduction of any of the aforementioned enzymes in such living cells. Such modulations may be achieved by a variety of modification techniques, including, but not limited to, the modulation of one or more of the enzymatic activities of CYP82Y1; CYP82X2; AT1; CYP82X1; OMT; CXE1 and NOS, for example by modulating the native nucleic acid sequences encoding CYP82Y1; CYP82X2; AT1; CYP82X1; OMT; CXE1 and/or NOS, for example by gene silencing methodologies, such as antisense methodologies; or by the use of modification techniques resulting in modulation of activity of the enzymes using for example site directed mutagenesis, targeted mutagenesis, random mutagenesis, virus-induced gene silencing, the addition of organic solvents, gene shuffling or a combination of these and other techniques known to those of skill in the art, each methodology designed to alter the activity of the enzymes of CYP82Y1; CYP82X2; AT1; CYP82X1; OMT; CXE1 and NOS, in such a manner that the accumulation of one or more of noscapine or the noscapine intermediates in the living cells increases. Thus the present disclosure further includes embodiments which involve modulating living cells by reducing the production of NOS in order to produce narcotine hemiacetal and/or papaveroxine; modulating living cells by reducing the production of CXE1 in order to produce 3-O-acetyl-papaveroxine; modulating living cells by reducing the production of OMT in order to produce 4′-O-desmethoxy-3-O-acetyl-papaveroxine and/or 1,8-dihydroxy-13-O-acetyl-N-methylcanadine; modulating living cells by reducing the production of CYP82X1 in order to produce 1-hydroxy-13-O-acetyl-N-methylcanadine; modulating living cells by reducing the production of AT1 in order to produce 1,13-dihydroxy-N-methylcanadine; modulating living cells by reducing the production of CYP82X2 in order to produce 1-hydroxy-N-methylcanadine; and modulating living cells by reducing the production of CYP82Y1 in order to produce (S)—N-methylcanadine. Thus it will be clear that in accordance with the foregoing embodiments, noscapine synthesis intermediates may be produced by inhibiting an enzyme that converts the desired noscapine synthesis intermediate and providing the noscapine intermediate immediately upstream (as depicted in FIG. 1) of the desired noscapine synthesis intermediate under conditions that permit the production of the desired noscapine synthesis intermediate from the immediate upstream component. Thus, strictly by way of example, one may select a plant comprising the entire synthesis pathway depicted in FIG. 1 (Papaver somniferum for example), and inhibit CXE1 in such plant, thereby providing 4′-O-desmethoxy-3-O-acetyl under conditions that permit the production of papaveroxine, 3-O-acetyl-papaveroxine therefrom; or, and again, strictly by way of example, one may select a plant comprising the entire synthesis pathway depicted in FIG. 1 (Papaver somniferum for example), and inhibit AT1 in such plant, thereby providing 1-hydroxy-methylcanadine under conditions that permit the production of 1,13-dihydroxy-methylcanadine therefrom.

[0425] Provided herein is further a method for preparing noscapine and one or more of the noscapine synthesis intermediates or noscapine precursors selected from the group of noscapine synthesis intermediates and noscapine precursors consisting of: (S)—N-methylcanadine; 1-hydroxy-N-methylcanadine; 1,13-dihydroxy-N-methylcanadine; 1-hydroxy-O-acetyl-N-methylcanadine; 1,8-dihydroxy-13-O-acetyl-N-methylcanadine; 4′-O-desmethoxy-3-O-acetyl-papaveroxine; 3-O-acetyl-papaveroxine; papaveroxine; and narcotine hemiacetal comprising:
[0426] (a) providing a chimeric nucleic acid sequence comprising (i) one or more nucleic acid sequences complementary all or a portion of the mRNA synthesized by the nucleic acid sequence encoding the polypeptides selected from the group of polypeptides consisting of CYP82Y1; CYP82X2; AT1; CYP82X1; OMT; CXE1 and NOS; and (ii) one or more elements capable of controlling transcription of the complementary nucleic acid sequence, wherein the chimeric nucleic acid sequence is capable of producing an antisense RNA complementary all or a portion of the mRNA of the nucleic acid sequence encoding the polypeptides selected from the group of polypeptides consisting of CYP82Y1; CYP82X2; AT1; CYP82X1; OMT; CXE1 and NOS;
[0427] (b) introducing the chimeric nucleic acid sequence into a host cell;
[0428] (c) growing the host cell to produce the antisense RNA and inhibit synthesis of the polypeptide selected from the group of polypeptides consisting of CYP82Y1; CYP82X2; AT1; CYP82X1; OMT; CXE1 and/or NOS, and to produce one or more of noscapine; noscapine synthesis intermediate; or a noscapine precursor selected from the group of noscapine synthesis intermediates consisting of: (S)—N-methylcanadine; 1-hydroxy-N-methylcanadine; 1,13-dihydroxy-N-methylcanadine; 1-hydroxy-O-acetyl-N-methylcanadine; 1,8-dihydroxy-13-O-acetyl-N-methylcanadine; 4′-O-desmethoxy-3-O-acetyl-papaveroxine; 3-O-acetyl-papaveroxine; papaveroxine; and narcotine hemiacetal; and
[0429] (d) recovering noscapine; noscapine synthesis intermediate or noscapine precursor selected from the group of noscapine synthesis intermediates and noscapine precursors consisting of (S)—N-methylcanadine; 1-hydroxy-N-methylcanadine; 1,13-dihydroxy-N-methylcanadine; 1-hydroxy-O-acetyl-N-methylcanadine; 1,8-dihydroxy-13-O-acetyl-N-methylcanadine; 4′-O-desmethoxy-3-O-acetyl-papaveroxine; 3-O-acetyl-papaveroxine; papaveroxine; and narcotine hemiacetal.

### Compositions Comprising Noscapine Synthesis Intermediates and Noscapine Intermediate Synthesis Derivatives

[0430] In accordance with present disclosure, methods are provided to make various novel noscapine synthesis intermediates and noscapine synthesis intermediate derivatives. Accordingly, further included in the present disclosure are substantially pure or isolated forms of such noscapine intermediates and noscapine synthesis intermediate derivatives. Included in the present disclosure are substantially pure or isolated 1-hydroxy-N-methylcanadine having the chemical formula set forth in FIG. 2B; substantially pure or isolated 1,13-dihydroxy-N-methylcanadine having the chemical formula set forth in FIG. 2C; substantially pure or isolated 1-hydroxy-13-O-acetyl-N-methylcanadine having the chemical formula set forth in FIG. 2D; substantially pure or isolated 1,8-dihydroxy-13-O-acetyl-N-methylcanadine having the chemical formula set forth in FIG. 2E; a substantially pure or isolated 4′-O-desmethoxy-3-O-acetyl-papaveroxine having the chemical formula set forth in FIG. 2F; a substantially pure or isolated 4′-desmethoxypapaveroxine having the chemical formula set forth in FIG. 23A; a substantially pure or isolated narcotoline hemiacetal having the chemical formula set forth in FIG. 23B; and a substantially pure or isolated narcotoline having the chemical formula set forth in FIG. 23C

Use of Noscapine. Noscapine Synthesis Intermediates and Noscapine Synthesis Intermediate Derivatives

[0431] Noscapine obtained in accordance with the present disclosure may be formulated for use as a pharmaceutical drug, therapeutic agent or medicinal agent. Thus the present disclosure further includes a pharmaceutical composition comprising noscapine prepared in accordance with the methods of the present disclosure. Pharmaceutical drug preparations comprising noscapine in accordance with the present disclosure preferably further comprise vehicles, excipients and auxiliary substances, such as wetting or emulsifying agents, pH buffering substances and the like. These vehicles, excipients and auxiliary substances are generally pharmaceutical agents that may be administered without undue toxicity. Pharmaceutically acceptable excipients include, but are not limited to, liquids such as water, saline, polyethyleneglycol, hyaluronic acid, glycerol and ethanol. Pharmaceutically acceptable salts can also be included therein, for example, mineral acid salts such as hydrochlorides, phosphates, sulfates, and the like; and the salts of organic acids such as acetates, propionates, benzoates, and the like. It is also preferred, although not required, that the preparation will contain a pharmaceutically acceptable excipient that serves as a stabilizer. Examples of suitable carriers that also act as stabilizers for peptides include, without limitation, pharmaceutical grades of dextrose, sucrose, lactose, sorbitol, inositol, dextran, and the like. Other suitable carriers include, again without limitation, starch, cellulose, sodium or calcium phosphates, citric acid, glycine, polyethylene glycols (PEGs), and combinations thereof. The pharmaceutical composition may be formulated for oral and intravenous administration and other routes of administration as desired. Dosing may vary, but it is expected that ranges of noscapine between 66 mg (intravenous) and 150 mg (oral) will be tolerated. Dosing may be optimized using routine experimentation. The pharmaceutical composition comprising noscapine may be used as an anti-mitotic and anti-tumor agent, and may further be used to treat or ameliorate cancer, including, but not limiting to, lymphoma, breast cancer, melanoma, ovarian carcinoma, glioblastoma, colon cancer, human non-small cell lung cancer, in a patient having been diagnosed with any of the foregoing conditions. The pharmaceutical composition may further be used to treat or ameliorate stroke, as well as an antitussive drug and an anxiolytic drug.

[0432] In further embodiments, the present disclosure provides methods for treating a patient with a pharmaceutical composition comprising noscapine prepared in accordance with the present disclosure. Accordingly, the present disclosure further provides a method for treating a patient with noscapine prepared according to the methods of the present disclosure, said method comprising administering to the patient a composition comprising noscapine, wherein noscapine is administered in an amount sufficient to ameliorate a medical condition in the patient. In preferred embodiments the medical condition is selected from the group of medical conditions consisting of lymphoma, breast cancer, melanoma, ovarian carcinoma, glioblastoma, colon cancer, human non-small cell lung cancer, stroke, anxiety, and coughing.

[0433] The noscapine synthesis intermediates provided herein are useful as agents to manufacture noscapine and noscapine derivatives and noscapine synthesis intermediate derivatives. Noscapine synthesis from the noscapine synthesis intermediates herein provided may conveniently be performed in accordance with the methods herein disclosed. It will be apparent however to those of skill in the art that the noscapine synthesis intermediates herein provided may equally be suitable as compositions to manufacture noscapine using other synthesis methodologies, including chemical synthesis methodologies.

### EXAMPLES

[0434] Hereinafter are provided examples of specific embodiments for performing the methods of the present disclosure, as well as embodiments representing the compositions of the present disclosure. The examples are provided for illustrative purposes only, and are not intended to limit the scope of the present disclosure in any way.

### Example 1

### Isolation of Nucleic Acid Sequence Encoding CYP82Y1

[0435] The opium poppy chemotypes Bea's Choice and Veronica (Desgagné-Penix et al. 2010, BMC Plant Biol. 10: 252) were cultivated at 20/18° C. (light/dark) in a growth chamber (Conviron, Winnipeg, Canada) with a photoperiod of 16 h and a combination of fluorescent and incandescent lighting. Total RNA and alkaloid extractions from the latex of eight opium poppy chemotypes were subjected to transcript and metabolite profiling, respectively, as described previously (Desgagné-Penix et al. 2010, BMC Plant Biol. 10: 252; Dang and Facchini 2012, Plant Physiol. 159-618-631). CYP82Y1 was identified among genes differentially expressed in noscapine-free (Deborah, Przemko, 40 and T) and noscapine-producing (Natasha, Marianne, Roxanne, and Veronica) chemotypes of opium poppy (Desgagné-Penix et al. 2010, BMC Plant Biol. 10: 252). The full-length coding region of CYP82Y1, was assembled in silico by searching each database using the tBLASTn algorithm, and is provided herein as SEQ.ID NO:1. The deduced amino acid sequence is provided herein as SEQ.ID NO:2 Relative transcript abundance was determined as the number of reads corresponding to each selected candidate compared with the total number of reads in each database (Dang and Facchini 2012, Plant Physiol. 159-618-631).

### Example 2

### Isolation of Nucleic Acid Sequence Encoding NOS

[0436] Opium poppy (Papaver somniferum) chemotypes Bea's Choice and Roxanne were grown as described previously (Dang et al. 2012, Methods [symbol] Enzymol. 515: 231-266). Narcotoline hemiacetal and codeinone were purchased from Toronto Research Chemicals (Toronto, Canada). Salutaridine was isolated by methanol extraction from the latex of plants subjected to virus-induced silencing of the gene encoding salutaridine reductase (SalR) (Wijekoon and Facchini, 2012, Plant J. 69: 1052-1063) and purified on a Silica Gel 60 F₂₅₄ TLC plate (Merck, Whitehouse Station, N.J.), which was subsequently developed in a solvent system of toluene:acetone:ammonia ethanol [45:45:10 (v/v)]. The source of all other alkaloids has been described previously (Dang and Facchini, 2012, Plant Physiol. 159: 618-631). An integrated transcript and metabolite profiling strategy was used to identify NOS. Previously, we established a deep transcriptome database using 454 pyrosequencing for eight opium poppy chemotypes displaying different alkaloid profiles (Desgagné-Penix et al. 2012, Plant J. 72: 331-344). Using these resources, differential expression analysis performed using two poppy chemotypes: Deborah with non-detectable levels of noscapine and Marianne with substantial accumulation of noscapine and narcotoline, Candidate transcripts were selected that were either exclusive to or showed higher abundance in Marianne. Dehydrogenation of a hydroxyl group is normally catalyzed by a bi-functional dehydrogenase/reductase; thus, the search term ‘dehydrogenase/reductase’ was used to query the isolated sequence pool of 683 contigs and 22 candidate sequences annotated with various dehydrogenase/reductase functions were returned. Using these candidate sequences to query the transcriptome databases of seven opium poppy cultivars, including three noscapine-free chemotypes (i.e. T, 40, and Deborah) and four noscapine-abundant chemotypes (i.e. Marianne, Natasha, Roxanne, and Veronica), the relative transcript abundance (defined as the number of reads per contig divided by the total number of 454 reads used to generate contigs assembling in each database) of the individual 22 candidates was obtained and compared across different cultivars. Out of 22 candidates, one (designated CL1327Contig1) was not present in the transcriptome databases of the three noscapine-free chemotypes and showed substantial transcript abundance in all four noscapine-abundant chemotypes. No other candidate showed a consistent correlation between the occurrence of transcripts and noscapine across all seven cultivars. Thus, CL1327Contig1 was considered as the prime candidate for the dehydrogenase/reductase catalyzing the conversion of narcotinhemiacetal to noscapine. The CL1327Contig1 sequence was 1207 base pairs (bp) in length and contained only a partial open reading frame. Using this sequence to query the transcriptome databases of the three noscapine-abundant cultivars, the full-length gene was obtained, which contained a coding region of 1044 bp encoding 348 amino acids. The nucleic acid sequence is provided herein as SEQ.ID NO:13. The deduced amino acid sequence is provided herein as SEQ.ID NO:14. Sequence structure analysis (Conserved Domain Search, NCBI) indicated that the enzyme contains conserved domains including an N-terminal glycine-rich motif TG²⁸G²⁹AG³¹YLA predicted to be involved in NAD(P)(H) binding and an catalytic active site Y¹⁸⁶VVSK¹⁹⁰ found in the ‘extended’ short-chain dehydrogenase/reductase (SDR) family. A BLAST search against the NCBI reference proteins (refseq_protein) revealed that the enzyme shared 51% amino acid sequence identity with dihydroflavonol-4-reductases, which belong to the extended SDR family, from a number of plant species including mouse-ear cress (Arabidopsis thaliana), castor bean (Ricinus communis), and barrel clover (Medicago truncatula). Three known dehydrogenase/reductase enzymes are involved in BIA metabolism: the SDRs salutaridine reductase (SalR) (Ziegler et al., 2006, Plant J. 48: 177-192) and sanguinarine reductase (SanR) (Vogel et al., 2010, J. Biol. Chem. 285: 18397-18406) and the aldo-keto reductase (AKR) codeinone reductase (COR) (Unterlinner et al., 1999, Plant J. 18: 465-475). Phylogenetic analysis of NOS, SalR, SanR, COR, and corresponding homologs from different plant species revealed low sequence identity among the SDRs suggesting a divergent function for NOS compared with other enzymes.

### Example 3

### Expression of CYP82Y1 in Yeast

[0437] The full-length coding region of CYP82Y1 was amplified from cDNA derived from total stem RNA of the Bea's Choice chemotype using Takara Ex Taq DNA polymerase (Fisher Scientific, Ottawa, Canada) and the following primer set: 5′-ATTAGCGGCCGCACCATGGCGTATTTGATGATCAA-3′ and 5′-CATAACTAGTGCATCTAGTGT GCGTGGGGTGA-3′. A-tailing with Taq DNA polymerase, the amplicon was cloned into pGEM-T (Promega, Madison, Wis.) and propagated in E. coli strain XL1BlueMRF. For heterologous over-expression of Flag-tagged CYP82Y1, the plasmid was ligated into the NotI and SpeI restriction site of the dual plasmid pESC-leu2d::CPR (Ro et al. 2008, BMC Biotech 8: 83; Beaudoin and Facchini 2013, Biochem. Biophys. Res. Commun. 431: 597-603) yielding pESC-Leu2d::CYP82Y1/CPR. Yeast harboring pESC-leu2d::MSH/CPR, which produces cytochrome P450 reductase (CPR) and N-methylstylopine 14-hydroxylase (MSH), denoted in FIG. 3 “CPR/MSH”) (Beaudoin and Facchini 2013, Biochem. Biophys. Res. Commun. 431: 597-603) was used as a positive control to assess the expression of CYP82Y1. Yeast harboring pESC-leu2d::CPR (denoted in FIG. 3 “CPR”) was used as the negative control.

[0438] The protease-deficient Saccharomyces cerevisiae strain YPL 154C:Pep4 was transformed with pESC-Leu2d::CYP82Y1/CPR. The transformed yeast was used to inoculate 2 mL of synthetic complete (SC) medium lacking leucine (Leu) (SC-Leu), but containing 2% (w/v) glucose, and cultured overnight on a gyratory shaker at 250 rpm and at 30° C. This initial culture was then diluted 100-fold in SC-Leu medium supplemented with 2% (w/v) glucose and cultured for 16 h. Yeast was harvested and transferred to fresh SC-Leu containing 2% (w/v) galactose for 24 h to induce expression of recombinant genes. For in vitro assays, yeast was transferred to fresh SC-Leu containing 2% (w/v) galactose, 50 μM (S)—N-methylcanadine, and 100 mM HEPES/NaOH (pH 7.5). After cultivation for 24 h, yeast cells were removed and the culture medium was extracted twice with methanol, which was reduced to dryness and subjected to LC-MS/MS analysis. Yeast strain YPL 154C:Pep4 harboring pESC-Leu2d::CPR was used as the negative control.

[0439] Yeast microsomes were prepared as described previously (Pompon et al. 1996, Methods Enzym. 272: 51-64). Yeast cells were lysed for 5 min using a micro-beadbeater and 500 μm diameter glass beads. Recombinant enzymes were detected by immunoblot analysis. Briefly, microsomal proteins were fractionated on a 10% (w/v) gel using SDS-PAGE and transferred to a nitrocellulose membrane. The membrane was blocked with 5% (w/v) skim milk in TBST buffer [25 mM Tris-HCl, pH 7.5, 150 mM NaCl and 0.05% (v/v) Tween 20] for 1 h, and subsequently incubated with α-FLAG M2 and α-c-Myc antibodies (Bioshop) used at a dilution of 1:5,000 to detect CYP and CPR proteins, respectively. After incubation with primary antibodies, membranes were washed three times with TBST and incubated with goat anti-mouse secondary antibody (Sigma-Aldrich) used at a dilution of 1:10,000. The membranes were again washed three times in TBST and bound secondary antibodies were detected using SuperSignal West Pico Chemiluminescent Substrate. Heterologous expression and detection of CYP82Y1 in yeast microsomes is shown in FIG. 3.

### Example 4

### Cloning, Expression and Isolation of NOS in E. coli

[0440] The full-length cDNA sequence of CL1327Contig1 (see: Example 2) was cloned into vector pRSETA in-frame with an N-terminal His-tag and expressed in E. coli as follows. The NOS coding region was amplified from opium poppy stem cDNA using the following primer set: 5′-GACTGAGCTCATGCATGGACAGAAAAATA TATCAGAGAG-3′ and 5′-GACTGGTACCTAC TAAAGGAAACCCTTCTCTTTGGCACATCG-3′. The NOS cDNA was cloned into the expression vector pRSETA (Invitrogen) at the SacI and KpnI restriction sites in frame with an N-terminal His-tag sequence. The expression construct was transformed into Escherichia coli strain Rosetta (DE3) pLysS (EMD Chemicals, Darmstadt, Germany). Expression of the recombinant gene was induced overnight with 1 mM isopropyl β-D-thiogalactoside (IPTG) at room temperature. Cells were harvested by centrifugation and sonicated in a buffer containing 50 mM sodium phosphate, pH 7.0, 300 mM NaCl, and 10 mM β-mercaptoethanol. After centrifugation at 20,000 g for 10 min, the supernatant was loaded onto Talon cobalt affinity resin (Clontech, Mountain View, Calif.). Purification was performed according to the manufacturer's instruction. The purified, recombinant protein was desalted using an Amicon centrifugal filter −30K (Millipore, Billerica, Mass.) and stored in a buffer containing 50 mM Tris-HCl, pH 8.0, 1 mM EDTA, 1 mM 13-mercaptoethanol, and 10% (v/v) glycerol. Protein concentration was determined by the Bradford assay (Bio-Rad, Hercules, Calif.) using bovine serum albumin as the standard. The recombinant protein was purified to homogeneity and showed a molecular weight of 42 kDa, as further detailed in FIG. 4.

### Example 5

### In Vitro Conversion of (S)—N-Methylcanadine to 1-Hydroxy-N-Methylcanadine

[0441] In vitro enzyme assays were performed using yeast microsomal fractions prepared as described in Example 3. (S)—N-methylcanadine to 1-hydroxy-N-methylcanadine was exogenously added to the microsomal fractions as a substrate yielding 1-hydroxy-N-methylcanadine. Enzyme assays were performed in 200 μL of 100 mM HEPES-NaOH, pH 7.5, containing 5 mg of total microsomal proteins, 50 μM (S)—N-methylcanadine and 500 μM NADPH. The reaction was conducted on a gyratory shaker with gentle agitation (60 rpm) at 30° C. for 30 min. The reaction was stopped by the addition of 800 μL methanol. Control assays were performed with microsomal protein extracts from yeast harboring pESC-leu2th:CPR. Results were evaluated using LC-MS/MS. Enzyme assay samples were diluted 1:10, with solvent A [10 mM ammonium acetate:acetonitrile (95:5)] and analyzed using a 6410 Triple Quadruple LC-MS/MS (Agilent Technologies, Santa Clara, Calif.). Liquid chromatography was carried out using a Poroshell 120 SB C18 column (2.1×50 mm, 2.7 μm particle size; Agilent Technologies) at a flow rate of 0.7 mL min⁻¹. The column was equilibrated in solvent A and the following elution conditions were used: 0 to 6 min 60% solvent B (acetonitrile), 6 to 7 min ramp to 99% solvent B, 7 to 9 min isocratic at 99% solvent B, and 9 to 13 min ramp to 0% solvent B. Samples were injected into the mass analyzer via an electrospray ionization (ESI) probe inlet. Ions were generated and focused using the following parameters: capillary voltage, 4000 kV; gas flow, 9 L min⁻¹, fragmentor voltage, 100V; nebulizer pressure, 40 psi; gas temperature, 330 [symbol] C. Mass spectrometry data were acquired in positive ion mode in the range of m/z 200-700. LC-MS/MS ion-chromatograms showing in vitro catalytic activity of CYP82Y1 compared with a negative control is shown in FIG. 5. Additionally, a variety of alkaloids belonging to several different benzoisoquinoline alkaloid subgroups (1-benzylisoquinoline, morphinan, protoberberine, pavine, aporphine, benzophenanthridine, protopine, phthalideisoquinoline, and bisbenzylisoquinoline) were tested as potential CYP82Y1 substrates. None of these substrates were converted by CYP82Y1.

### Example 6

### Structure of 1-Hydroxy-N-Methylcanadine

[0442] Yeast microsomes were prepared from a yeast strain expressing CYP82Y1, as described in Examples 2 and 3 and enzyme catalysis was conducted in vitro as described in Example 5. The enzymatic reaction product was identified as follows.

[0443] High-resolution MSⁿ experiments were performed using an LTQ-Orbitrap XL equipped with a syringe pump and an Accela HPLC system (ThermoFisher Scientific). Alkaloids (1 μg mL⁻¹) were introduced continuously with a syringe pump (5 μK min⁻¹) into the HPLC flow at a rate of 500 mL min⁻¹ using acetonitrile and positive ions were generated by heated ESI with the following parameters: heater, 400° C.; sheath gas, 60 au; auxiliary gas, 20 au; spray voltage, 3 kV. Ion interface settings were 380° C. and 38 V (capillary) and 85 V (tube lens). MSⁿ experiments were performed by conducting CID on target ions isolated in the linear ion trap followed by high-resolution (60,000 FWHM) mass analysis of the resulting fragment ions in the Orbitrap XL. Full-scan data was collected in centroid mode over mass ranges extending from the lowest permissible value up to 10 atomic mass units (amu) beyond the parent ion. Detection methods consisted of 3 scan events of approximately 1 s each with a total run time of 10 min. External and internal instrument calibration ensured an error of <2 ppm.

[0444] Collision-induced dissociation (CID) mass spectra were recorded using collision energy of −25.0 eV applied in quadrupole 2 and an argon collision gas pressure of 1.8×10-3 torr. MS2 fragments were analyzed in quadrupole 3 by scanning from m/z 40 to m/z 2 greater than that of the precursor ion. Compounds were identified based on retention times and CID spectra compared with authentic standards, and alkaloid content was calculated as ng alkaloid μg-1 dry weight of latex based on standard quantification curves.

[0445] Since authentic standards were not available and the compound quantities were insufficient to perform NMR, mass fragmentation data for the enzymatic reaction product (1-hydroxy-N-methylcanadine) and the substrate (N-methylcanadine) were compared to authentic standards of the phthalideisoquinoline alkaloids narcotoline and hydrastine. Narcotoline and 1-hydroxyl-N-methylcanadine both possess a 1-hydroxyl group, whereas hydrastine and N-methylcanadine are not hydroxylated at the C-1 position. CID of both phthalideisoquinoline and protoberberine alkaloids generally yielded a principal isoquinoline fragment (Le, P. M. et al., Anal. Bioanal. Chem. 405: 4487-4498), which allowed MS³ fragmentation analysis of equivalent MS² daughter ions. Narcotoline and the 1-hydroxy-N-methylcanadine reaction product yielded isoquinoline fragments at 206.08124 and 206.08123 m/z, respectively, corresponding to an elemental formula of C₁₁H₁₂O₃N and indicating that hydroxylation of N-methylcanadine had occurred at position C-1 (FIG. 6 A and B). In contrast, MS² of hydrastine and the N-methylcanadine substrate both yielded fragments at 190.08625 m/z corresponding to an elemental formula of C₁₁H₁₂O₂N, which is consistent with an isoquinoline moiety lacking a 1-hydroxyl group (FIG. 6 C and D). To confirm that 1-hydroxylation of N-methylcanadine had occurred, CID analysis of all isoquinoline ions was performed. MS³ revealed nearly identical spectra for both 1-hydroxylated isoquinoline moieties of hydroxyl-N-methylcanadine and narcotoline (FIG. 6 E and F) and similarly identical spectra for both non-hydroxylated isoquinoline ions (FIG. 6 G and H) of N-methylcanadine and hydrastine. Since the product derived from N-methylstylopine also produced similar fragmentation pattern with in triple quadrupole MS/MS, we conclude that a similar hydroxylation event has happened to N-methylstylopine (m/z 338.2) to give rise to 1-hydroxy-N-methylstylopine. The foregoing establishes that the reaction product of N-methylcanadine is 1-hydroxy-N-methylcanadine.

### Example 7

### In Vitro Conversion of Narcotine Hemiacetal to Noscapine

[0446] The purified recombinant NOS enzyme (see: Example 4) was assayed using either narcotine hemiacetal as the substrate (in the presence of either NAD⁺ or NADP⁺ as cofactor) for dehydrogenase activity, or with noscapine as the substrate (in the presence of NADH or NADPH as the cofactor) for reductase activity. LC-MS/MS was used to identify and quantify product formation (FIG. 7). When the recombinant protein was assayed with narcotine hemiacetal (m/z 416), the formation of a new compound of m/z 414 was detected. ESI[+]-CID on the reaction product at m/z 414 produced a spectrum consistent with the corresponding spectrum of authentic noscapine (FIG. 8). Thus, the NOS recombinant enzyme was able to oxidize the hydroxyl group on the hemiacetal ring of narcotine hemiacetal to a keto-group and, thus, form the lactone ring of noscapine. LC-MS/MS and CID spec

[0447] Initial enzyme assays suggested that NOS accepted both NAD⁺ and NADP⁺ as cofactors for the conversion of narcotine hemiacetal to noscapine. Further kinetic analysis for NAD⁺ showed Kₘ and kcat/Km values of 33.1 μM and 16,240 M⁻¹ s⁻¹, respectively. The Kₘ value for NADP⁺ was substantially higher than that of NAD⁺ at 1,249 μM and the corresponding kcat/Km value for NADP⁺ was much lower than that for NAD⁺ at 1,380 M⁻¹ s⁻¹ indicating a greater cofactor affinity and higher catalytic efficiency for NOS in the presence of NAD⁺ as opposed to NADP⁺. In the presence of NAD⁺, the affinity of NOS for the alkaloid substrate narcotine hemiacetal and the corresponding catalytic efficiency were also significantly higher compared with the use of NADP⁺ as the cofactor, which were reflected by the lower Kₘ and higher corresponding kcat/Km values for narcotine hemiacetal with NAD⁺ as a cofactor. In addition to narcotine hemiacetal and noscapine, NOS was also assayed with several other BIAs that could potentially serve as substrates for dehydrogenase/reductase reactions. Morphine, codeine, codeinone, salutaridine and stylopine (Bagel et al. 2012, J. Biol. Chem. 287: 42927-42983) were tested as possible substrates in corresponding assays, but none were accepted by NOS.

### Example 8

### In Vivo Production of 1-Hydroxy-N-Methylcanadine in Yeast

[0448] Yeast strains harboring the coding region of CYP82Y1 and pESC-leu2th:CPR, as a control, were grown on a medium comprising (S)—N-methylcanadine. Microsomes were extracted as described in Example 3. Enzyme assays were performed as in example 5, except that no exogenous enzyme substrate was included in the assay. LC-MS/MS was performed as described in Example 5. FIG. 9 shows the in vivo formation of a reaction product with m/z 370, which is absent in the control. The m/z 370 of the reaction product is identical to m/z 370 of the product the inventors have identified as 1-hydroxy-N-methylcanadine as described in Example 6. Accordingly this example demonstrates the in vivo production of 1-hydroxy-N-methylcanadine.

### Example 9

### In Vivo Production of Narcotine Hemiacetal in Plants

[0449] In this example, by inhibiting NOS in a plant using virus induced gene-silencing (VIGS), there is provided papaveroxine under conditions that permit the conversion of papaveroxine to produce narcotine-hemiacetal therefrom.

[0450] A NOS-specific silencing construct was designed as described previously (Winzer et al., 2012, Science 336, 1704-1708). A 323-bp fragment of NOS was inserted into the XbaI and KpnI sites of pTRV2. Primers used for amplification were: 5′-TGCATCTAGAGAAATTGACGAGACAATAT GG-3′ and 5′-TGCAGGTACCCATTCAAAAAC GAATATGTGTGC-3′. The pTRV2-NOS construct and pTRV2 empty vector were individually transformed into Agrobacterium tumefaciens strain GV3101. Bacterial preparation, plant infiltration, tissue collection, total RNA isolation, and first-strand cDNA synthesis were performed as described previously by Dang et al., 2012, Methods enzymol. 515; 231-266. PCR was performed using primers (5′-TTACTCAAGGAA GCACGATGAGC-3′ and 5′-GAACCGTAGTTT AA TGTCTTCGGG-3′) specific to sequences flanking the multiple cloning site of pTRV2 to confirm the presence of the transgene cassette. Positive samples were subjected to RT-qPCR to analyze NOS transcript abundance. Frozen latex samples were lyophilized for 72 h until completely dehydrated and extracted with 30 μL of methanol per milligram of dried latex for 48 h at 4° C. After centrifugation at 20,000 g for 10 min, the supernatant was diluted 500- or 5000-fold for LC-MS/MS analysis. LC-MS/MS was performed using a 6410 Triple Quadropole LC-MS/MS (Agilent Technologies, Santa Clara, Calif.) for identification and quantification of alkaloids. Chromatographic separation was achieved using a Poroshell 120 SB-C18 HPLC column (Agilent Technologies) at a nitrogen flow rate of 0.7 mL/min using solvent A (10 mM ammonium acetate, pH 5.5, 5% acetonitrile) and Solvent B (100% acetonitrile) with the following gradient, i.e. 0-80% Solvent B from 0-6 minutes, 80-99% Solvent B from 6-7 minutes, isocratic 99% Solvent B from 7-8 minutes, 99-0% Solvent B from 8-8.1 minutes, followed by 0% Solvent B from 8.1-11.1 minutes. Electrospray ionization, full scan mass analyses (m/z range 200-700) and collisional MS/MS experiments were performed as described previously (Farrow et al., 2012, Phytochemistry 77: 79-88). Collision-induced dissociation (CID) spectra of noscapine (m/z 414) and narcotinhemiacetal (m/z 416) were acquired at 25 eV and 10 eV, respectively, and fragmentation patterns were used to confirm compound identities. Multiple-reaction monitoring (MRM) mass analysis with collision energy of 25 eV and the product ion of m/z 220 was used for quantification of noscapine and narcotine hemiacetal in kinetics analyses.

[0451] The pTRV2-NOS construct was infiltrated along with pTRV1 into opium poppy seedlings. The pTRV2 empty vector (EV) in A. tumefaciens was also infiltrated into opium poppy seedlings as a negative control. A total of 22 and 16 successfully infiltrated plants were obtained for NOS-silencing and EV control constructs, respectively. qRT-PCR was used to quantify the relative abundance of NOS transcripts and LC-MS/MS was used to analyze the content of specific alkaloids in all infiltrated plants. Compared with the EV control, NOS transcript levels were significantly reduced by 71% in NOS-silenced plants (P<0.01). Correspondingly, the average noscapine content in NOS-silenced plants was also significantly reduced compared with EV controls (P<0.05) (FIG. 10). By contrast, narcotine hemiacetal accumulated at a significantly higher level in NOS-silenced plants compared with EV controls (P<0.01) (FIG. 10). Relative levels of other major BIAs and some key pathway intermediates did not show any significant differences (P>0.1) in NOS-silenced and EV control plants. The relative transcript abundances of several genes, many identified in the noscapine gene cluster and all putatively involved in noscapine biosynthesis, were unaffected by the suppression of NOS transcript.

### Example 10

### In Vivo Production of (S)—N-Methylcanadine in a Plant

[0452] In this example, by inhibiting CYP82Y1 in a plant using virus induced gene-silencing (VIGS), there is provided (S)—N-methylcanadine.

[0453] A sequence encompassing part of the 3′-UTR and coding region of CYP82Y1 was used to construct a VIGS vector. The fragment was cloned into pTRV2 and vectors were mobilized in Agrobacterium tumefaciens as described previously (Dang and Facchini, 2012, Plant Physiol. 159: 618-631). Apical meristems of two to three week-old seedlings were infiltrated with a 1:1 mixture of A. tumefaciens harboring pTRV1 and either pTRV2::CYP82Y1 or pTRV2. Infiltrated plants were grown in the greenhouse for 8-10 weeks. Visual confirmation of gene silencing was monitored using the pTRV2-PDS construct encoding phytoene desaturase. Latex and stems of infiltrated opium poppy was collected immediately prior to anthesis as described previously (Dang and Facchini, 2012, Plant Physiol. 159: 618-631). Briefly, a 1-cm stem segment below the flower bud and approximately 10 μL of exuding latex were collected for alkaloid analysis. Infiltration with A. tumefaciens was confirmed by detection of the RNA corresponding to the TRV2 transgene cassette in VIGS-treated plants using TRV-MCS primers specific to sequences flanking the multiple cloning site of pTRV2, and using glyceraldehyde 3-phosphate dehydrogenase (GAPDH) as a positive control. Latex samples from infiltrated plants were lyophilized, resuspended in methanol at a concentration of 0.1 μg μL⁻¹ and extracted overnight in −80° C. Transcript analysis of infiltrated plants was performed by real-time quantitative PCR (RT-qPCR) using a 7300 Real-Time PCR system (Applied Biosystems, Burlington, Ontario, Canada) for 40 cycles of template denaturation, primer annealing, and primer extension. Each 10-μL PCR contained 1 μL of cDNA, 300 nM forward and reverse primers, and 1× KAPA SYBR FAST qPCR Kit (Kapa Biosystems, Boston, Mass.). The opium poppy gene encoding ubiquitin was used as an endogenous reference and plant lines showing the highest expression level served as the calibrator for each target gene. Dissociation curve analysis was used to validate qPCR specificity. Relative gene expression data were analyzed using the 2^{-ΔΔCt} method (Livak and Schmittgen, 2001, Methods 25: 402-431) based on 54 independent values (i.e. 3 technical replicates performed on each of 3 stem segments taken from each of 6 individual plants). Statistical analysis was performed using an unpaired, two-tailed Student t test. LC-MS/MS was carried out as described in example 5, except that samples were diluted 1:1000 with solvent A and elution conditions were 0 to 6 min 60% solvent B, 6 to 9 min ramp to 99% solvent B, 9 to 14 min isocratic at 99% solvent B, and 14 to 18 min ramp to 0% solvent B, and ions were generated and focused using the following parameters capillary voltage, 4000 kV; gas flow, 10 L min⁻¹; fragmentor voltage, 100 V; nebulizer pressure, 50 psi; gas temperature, 350° C.

[0454] TRV infection of infiltrated plants was confirmed by reverse transcription-PCR amplification of TRV2 RNA. CYP82Y1 transcript levels were significantly reduced in plants infiltrated with A. tumefaciens harboring the pTRV2-82Y1 construct compared with the empty pTRV2 vector control. Total alkaloid content, and the levels of major alkaloids including morphine, codeine, reticuline, and thebaine were not altered in CYP82Y1-silenced plants compared with controls. However, the suppression of CYP82Y1 transcript levels significantly reduced the accumulation of noscapine, while CYP82Y1-silenced plants accumulated increased levels of N-methylcanadine (FIG. 11).

### Example 11

### Isolation of a Nucleic Acid Sequence Encoding CYP82X2

[0455] Opium poppy (Papaver somniferum) chemotypes Bea's Choice and Veronica were cultivated at 20/18° C. (light/dark) in a growth chamber (Conviron, Winnipeg, Canada) with a photoperiod of 16 h and a combination of Cool White fluorescent (Sylvania, Mississauga, Canada) and incandescent lighting. Total RNA and alkaloid extractions from the latex of eight opium poppy chemotypes were subjected to transcript and metabolite profiling, respectively, as described previously (Desgagné-Penix et al. 2010, BMC Plant Biol. 10: 252; Dang and Facchini 2012, Plant Physiol. 159-618-631). CYP82X2 was identified among genes differentially expressed in noscapine-free (Deborah, Przemko, 40 and T) and noscapine-producing (Natasha, Marianne, Roxanne, and Veronica) chemotypes of opium poppy (Desgagné-Penix et al. 2010, BMC Plant Biol. 10: 252). The full-length coding region of CYP82X2, was assembled in silico by searching each database using the tBLASTn algorithm, and is provided herein as SEQ.ID NO:3. The deduced amino acid sequence is provided herein as SEQ.ID NO:4. Relative transcript abundance was determined as the number of reads corresponding to each selected candidate compared with the total number of reads in each database (Dang and Facchini 2012, Plant Physiol. 159-618-631).

### Example 12

### Isolation of a Nucleic Acid Sequence Encoding CYP82X1

[0456] Opium poppy (Papaver somniferum) chemotypes Bea's Choice and Veronica were cultivated at 20/18° C. (light/dark) in a growth chamber (Conviron, Winnipeg, Canada) with a photoperiod of 16 h and a combination of Cool White fluorescent (Sylvania, Mississauga, Canada) and incandescent lighting. Total RNA and alkaloid extractions from the latex of eight opium poppy chemotypes were subjected to transcript and metabolite profiling, respectively, as described previously (Desgagné-Penix et al. 2010, BMC Plant Biol. 10: 252; Dang and Facchini 2012, Plant Physiol. 159-618-631). CYP82X1 was identified among genes differentially expressed in noscapine-free (Deborah, Przemko, 40 and T) and noscapine-producing (Natasha, Marianne, Roxanne, and Veronica) chemotypes of opium poppy (Desgagné-Penix et al. 2010, BMC Plant Biol. 10: 252). The full-length coding region of CYP82X1, was assembled in silico by searching each database using the tBLASTn algorithm, and is provided herein as SEQ.ID NO:7. The deduced amino acid sequence is provided herein as SEQ.ID NO:8. Relative transcript abundance was determined as the number of reads corresponding to each selected candidate compared with the total number of reads in each database (Dang and Facchini 2012, Plant Physiol. 159-618-631).

### Example 13

### Isolation of a Nucleic Acid Sequence Encoding AT1

[0457] Opium poppy (Papaver somniferum) chemotypes Bea's Choice and Veronica were cultivated at 20/18° C. (light/dark) in a growth chamber (Conviron, Winnipeg, Canada) with a photoperiod of 16 h and a combination of Cool White fluorescent (Sylvania, Mississauga, Canada) and incandescent lighting. Total RNA and alkaloid extractions from the latex of eight opium poppy chemotypes were subjected to transcript and metabolite profiling, respectively, as described previously (Desgagné-Penix et al. 2010, BMC Plant Biol. 10: 252; Dang and Facchini 2012, Plant Physiol. 159-618-631). AT1 was identified among genes differentially expressed in noscapine-free (Deborah, Przemko, 40 and T) and noscapine-producing (Natasha, Marianne, Roxanne, and Veronica) chemotypes of opium poppy (Desgagné-Penix et al. 2010, BMC Plant Biol. 10: 252). The full-length coding region of AT1, was assembled in silico by searching each database using the tBLASTn algorithm, and is provided herein as SEQ.ID NO:5. The deduced amino acid sequence is provided herein as SEQ.ID NO:6. Relative transcript abundance was determined as the number of reads corresponding to each selected candidate compared with the total number of reads in each database (Dang and Facchini 2012, Plant Physiol. 159-618-631).

### Example 14

### Isolation of a Nucleic Acid Sequence Encoding CXE1 and CXE2

[0458] Opium poppy (Papaver somniferum) chemotypes Bea's Choice and Veronica were cultivated at 20/18° C. (light/dark) in a growth chamber (Conviron, Winnipeg, Canada) with a photoperiod of 16 h and a combination of Cool White fluorescent (Sylvania, Mississauga, Canada) and incandescent lighting. Total RNA and alkaloid extractions from the latex of eight opium poppy chemotypes were subjected to transcript and metabolite profiling, respectively, as described previously (Desgagné-Penix et al. 2010, BMC Plant Biol. 10: 252; Dang and Facchini 2012, Plant Physiol. 159-618-631). CXE1 and CXE2 were identified among genes differentially expressed in noscapine-free (Deborah, Przemko, 40 and T) and noscapine-producing (Natasha, Marianne, Roxanne, and Veronica) chemotypes of opium poppy (Desgagné-Penix et al. 2010, BMC Plant Biol. 10: 252). The full-length coding region of CXE1 and CXE2, was assembled in silico by searching each database using the tBLASTn algorithm, and is provided herein as SEQ.ID NO:11 and SEQ.ID NO: 15, respectively The respective deduced amino acid sequences are provided herein as SEQ.ID NO:12. And SEQ.ID NO: 16. Relative transcript abundance was determined as the number of reads corresponding to each selected candidate compared with the total number of reads in each database (Dang and Facchini 2012, Plant Physiol. 159-618-631).

### Example 15

### Expression of CYP82X2 and CYP82X1 in Yeast and AT1, CXE1 and CXE2 in E. coli

[0459] The full-length coding region of CYP82X1 was amplified using cDNA derived from total stem RNA of the Bea's Choice chemotype using Takara Ex Taq DNA polymerase (Fisher Scientific, Ottawa, Canada), and using a primer 5′-GCGGCCGCGCCATGGTTATTCATAAAG-3′ and reverse primer 5′-CATACCTAGTGCAACCCATGAATAAGAGCCGC-3′. Owing to problems with heterologous expression in yeast, CYP82X2 was synthesized with the first 60 N-terminal amino acids replaced with the first 43 N-terminal amino acids from the lettuce cytochrome P450 germacrene A oxidase Nguyen, D. T. et al. J. Biol. Chem. 285, 16588-16598 (2010). For heterologous expression of Flag-tagged CYPs in yeast (Saccharomyces cerevisiae), the full-length coding regions of CYP82X1 and CYP82X2 were inserted into the NotI and SpeI restriction sites of the dual plasmid pESC-leu2d::CPR Ro, D.-K., Ouellet, M., Paradise, E. M., Burd, H., Eng, D., Paddon, C. J., Newman, J. D., & Keasling, J. D. BMC Biotech. 8, 83 (2008) yielding pESC-Leu2d::CYP82X1/CPR and pESC-Leu2d::CYP82X2/CPR. The protease-deficient yeast strain YPL 154C:Pep4 was transformed with pESC-Leu2d::CYP82X1/CPR and pESC-Leu2d::CYP82X2/CPR. Yeast culture, microsome preparation, and immunoblot analysis were performed as described previously Dang, T.-T. T. & Facchini, P. J. J. Biol. Chem. 289, 2013-2026 (2014). For heterologous expression of CXE1, CXE2, and AT1, corresponding open reading frames were amplified using cDNA derived from total stem RNA of the Bea's Choice chemotype and cloned in-frame an N-terminal His-tag sequence in the Escherichia coli expression vector pRSETA (Invitrogen, Carlsbad, Calif.). CXE1 and CXE2 were individually inserted into the Sac′ and HindIII restriction sties, whereas AT1 was inserted into the KpnI and HindIII sites, of pRSETA using a primer 5′-GACTGGTACCATATGGCAACAATGTCTAGTGCTGCTGTAGTA-3′ and reverse primer 5′-GACTAAGCTTCACTAAAACAGTTGGAGGATCTCTCTTAGGTG-3′. Expression constructs were transformed into E. coli strain Rosetta (DE3) pLysS (EMD Chemicals, Darmstadt, Germany). Expression of recombinant CXE1, CXE2, and AT1 was induced using 1 mM isopropyl β-D-thiogalactoside (IPTG) at 37° C. for 5-6 h. Protein purification was performed as described previously (Chen, X. & Facchini, P. J. Plant J. 77, 173-184 (2014)). Results of the expression and purification of CYP82X1, CYP82X2, AT1, CXE1 and CXE2 are shown in FIG. 12. Microsomal fractions containing recombinant CYP82X1 or CYP82X2 were detected using α-FLAG antibodies, whereas recombinant CPR was detected using a-c-Myc antibodies (FIG. 12 A). Each lane contained 2 μg of total microsomal protein. A coomassie blue-stained, denaturing polyacrylamide gel showing the production of AT1 in E. coli and purification of the His-tagged recombinant enzyme is shown in FIG. 12 B. A coomassie blue-stained, denaturing polyacrylamide gel showing the production of CXE1 and CXE2 in E. coli, and purification of the His-tagged recombinant enzymes is shown in FIG. 12 C. Expression constructs were used to transform the E. coli Rosetta strain, and recombinant protein production was induced using 1 mM isopropyl β-D-thiogalactoside (IPTG). Purification of His-tagged recombinants proteins was performed using cobalt-affinity chromatography.

### Example 16

### In Vitro Activity of CYP82X2, AT1, CYP82X1, and CXE1; Production of 1,13 Dihydroxy-N-Methylcanadine, 1-Hydroxy-13-O-Acetyl-N-Methylcanadine, 4′Desmethoxy-3-O-Acetyl-Papaveroxine, Narcotoline Hemiacetal and Narcotine Hemiacetal

[0460] Yeast microsomal fractions for assaying CYP82X1 and CYP82X2 prepared as described in Example 3. Aliquots of enzyme substrates were exogenously added to the microsomal fractions. Enzyme assays were performed in 200 μL of 100 mM HEPES-NaOH, pH 7.5, containing 0.5 mg of total microsomal proteins, 50 μM (S)—N-methylcanadine and 500 μM NADPH. The reaction was conducted on a gyratory shaker with gentle agitation (60 rpm) at 30° C. for 20 min. The reaction was stopped by the addition of 800 μL methanol. Control assays were performed with microsomal protein extracts from yeast harboring pESC-leu2th:CPR. In vitro standard of CXE1 and CXE2 assays were performed at 30° C. for 15 min in a 40 μL of 100 mM Tris-HCl, pH 8.0, containing 50 μM of 3-O-acetylpapaveroxine, and purified protein (0.24 μg for CXE1 and 0.04 μg for CXE2). In vitro AT1 assays were performed at 30° C. for 15 min in 40 μL of 100 mM Tris-HCl, pH 8.0, containing 50 μM acetyl-CoA, 50 μM (S)-1,13-dihydroxy-N-methylcanadine, and 0.2 μg of purified protein. Reactions were quenched with 500 μL of acetonitrile, centrifuged at 20,000 g for 10 min, and the supernatant was subjected to LC-MS/MS analysis. Results were evaluated using LC-MS/MS. Experiments were performed using an LTQ-Orbitrap XL equipped with a syringe pump and an Accela HPLC system (ThermoFisher Scientific, Waltham, Mass.). Reaction products were reduced to dryness and redissolved in acetonitrile, and were introduced directly into the LTQ-Orbitrap with a syringe pump at a rate of 5 μL min⁻¹. ESI was performed as follows: sheath gas 10 au; 4.5 kV spray voltage. Ion interface settings were 275° C. and 19 V (capillary) and 60 V (tube lens). Reaction products were fractionated by HPLC using a flow rate of 500 μL min⁻¹ and the following gradient: Solvent A (10 mM ammonium acetate, pH 4.5), 100 to 80% (v/v) over 5 min, 80 to 50% (v/v) over 3 min, 50 to 0% (v/v) over 3 min. All products eluted before 10 min. Solvent B was 100% acetonitrile. For HPLC infusion, heated ESI was performed as follows: heater 400° C., sheath gas 60 au, auxiliary gas 20 au, spray voltage 3 kV. Ion interface settings were 380° C. and 6 V (capillary) and 45 V (tube lens). Mass spectrometry data were acquired in positive ion mode in various ranges of m/z 370-458. Results are shown in FIG. 13. Extracted ion chromatograms (EICs) show the in vitro catalytic activities of CYP82X2 (CPR/82X2) and CYP82X1 (CPR/82X1) on (S)-1-hydroxy-N-methylcanadine (m/z 370) yielding (S)-1,13-dihydroxy-N-methylcanadine (m/z 386) and 4-O-demethylmacrantaldehyde (m/z 386), respectively. No reaction products were detected in the negative control (CPR) (FIG. 13A). No products were detected when either CYP82X1 (CPR/82X1) or CYP82X2 (CPR/82X2) was incubated with (S)-1,13-dihydroxy-N-methylcanadine (m/z 386) (FIG. 13 B). EICs show the activity of native recombinant AT1 on (S)-1,13-dihydroxy-N-methylcanadine (m/z 386), forming (S)-1-hydroxy-13-O-acetyl-N-methylcanadine (m/z 428). Denatured AT1 was inactive (FIG. 13 C). EICs show the activity of CYP82X1 (CPR/82X1) converting (S)-1-hydroxy-13-O-acetyl-N-methylcanadine (m/z 428) to (S)-1,8-dihydroxy-13-O-acetyl-N-methylcanadine, which spontaneously rearranges to form 4′-O-desmethyl-3-O-acetylpapaveroxine (m/z 444). Spontaneous loss of the acetyl group yields narcotoline hemiacetal (m/z 402). CYP82X2 (CPR/82X2) showed no activity with (S)-1-hydroxy-13-O-acetyl-N-methylcanadine. No reaction products were detected in the negative control (CPR) (FIG. 13D). EICs show cleavage of the O-acetyl moiety from 3-O-acetylpapaveroxine (m/z 458) by native recombinant CXE1 yielding papaveroxine, which spontaneously rearranges to form narcotine hemiacetal (m/z 416). Denatured CXE1 was inactive (FIG. 13 E).

### Example 18

### Identification of the CYP82X2 Reaction Product as 1,13-Dihydroxy-N-Methylcanadine

[0461] High-resolution collision-induced dissociation (CID), higher-energy collision-induced dissociation (HCD), and non-collisional pulsed Q dissociation (PQD) analyses were conducted to confirm the identity of yeast produced CYP82X2 reaction products by comparison with authentic standards. Experiments were performed using an LTQ-Orbitrap XL equipped with a syringe pump and an Accela HPLC system (ThermoFisher Scientific, Waltham, Mass.). Reaction products were reduced to dryness and redissolved in acetonitrile, and were introduced directly into the LTQ-Orbitrap with a syringe pump at a rate of 5 μL min⁻¹. ESI was performed as follows: sheath gas 10 au; 4.5 kV spray voltage. Ion interface settings were 275° C. and 19 V (capillary) and 60 V (tube lens). Reaction products were fractionated by HPLC using a flow rate of 500 μL min⁻¹ and the following gradient: Solvent A (10 mM ammonium acetate, pH 4.5), 100 to 80% (v/v) over 5 min, 80 to 50% (v/v) over 3 min, 50 to 0% (v/v) over 3 min. All products eluted before 10 min. Solvent B was 100% acetonitrile. For HPLC infusion, heated ESI was performed as follows: heater 400° C., sheath gas 60 au, auxiliary gas 20 au, spray voltage 3 kV. Ion interface settings were 380° C. and 6 V (capillary) and 45 V (tube lens). CID was performed on ions isolated and fragmented in the linear ion trap followed with high-resolution (60,000 FWHM) mass analysis in the Orbitrap. HCD was performed in the HCD cell followed with high-resolution mass analysis in the Orbitrap. Non-collisional PQD was performed and analyzed in the linear ion trap. Full-scan data was collected in centroid (CID and HCD) or profile (PQD) mode over mass ranges extending from the lowest permissible value up to 10 atomic mass units beyond the parent ion. CID, HCD and PQD were each performed separately (i.e. the parallel detection feature was not used). External and internal instrument calibration ensured an error of <2 ppm for high-resolution experiments. CYP82X2 was prepared from yeast expressing CYP82X2 as described in Example 15. FIG. 14 shows the results of the three different ion dissociation methods used (high-resolution CID (FIG. 14 A, D, G), HCD (FIG. 14 B, E, H), and low-resolution PQD (FIG. 14 C, F, I)) to compare the spectra of the enzymatic substrate (1-hydroxy-N-methylcanadine, m/z 370, FIG. 14 A, B, C), the CYP82X2 reaction product (m/z 386, FIG. 14 D, E, F), and an authentic standard of (S)-1,13-dihydroxy-N-methylcanadine (m/z 386, FIG. 14 G, H, I). In all cases, fragmentation spectra of the CYP82X2 reaction product were identical to corresponding spectra of the authentic standard. The results provided in this Example 18 demonstrate that CYP82X2 is capable of catalyzing a chemical reaction involving the use of 1-hydroxy-N-methylcanadine as a substrate, to form 1-13-dihydroxy-N-methylcanadine.

### Example 19

### Identification of AT1 Reaction Product as 1-Hydroxy-13-O-Acetyl-N-Methylcanadine

[0462] NMR analysis was used to confirm the identity of the AT1 reaction product as follows. A scaled-up standard AT1 reaction using E. coli produced AT1 prepared essentially as described in Example 15, was performed to produce sufficient product from (S)-1,13-dihydroxy-N-methylcanadine for NMR analysis. The reaction was terminated by the addition of an equal volume of acetonitrile and precipitated protein was removed by centrifugation. Product purification from the concentrated supernatant was performed by preparative HPLC (Moravek Biochemicals, Brea, Calif.). Approximately 0.5 mg of (S)-1,13-dihydroxy-N-methylcanadine and 0.5 mg of (S)-1-hydroxy-13-O-acetyl-N-methylcanadine were independently dissolved in a solvent system consisting of 200 μL CDCl₃ and 50 μL D₃-CAN, and subjected to ¹H, ¹³C, COSY, HSQC and HMBC NMR analysis on an Agilent DD2 700 MHz spectrometer. The NMR data unequivocally confirmed the AT1 reaction product as (S)-1-hydroxy-13-O-acetyl-N-methylcanadine, which showed the same backbone structure as (S)-1,13-dihydroxy-N-methylcanadine with the exception of an acetyl group bound to the C13 oxygen. The results of the NMR analysis are shown in FIG. 15. Data for the enzymatic substrate (S)-1,13-dihydroxy-N-methylcanadine (m/z 386) and the AT1 reaction product (S)-1-hydroxy-13-O-acetyl-N-methylcanadine (m/z 428) are shown. (S)-1-Hydroxy-13-O-acetyl-N-methylcanadine displays the same backbone structure as (S)-1,13-dihydroxy-N-methylcanadine, but includes an additional acetyl ester linked to the C13 oxygen. The results provided in this Example 19 demonstrate that AT1 is capable of catalyzing a chemical reaction involving the use of 1,13-dihydroxy-N-methylcanadine as a substrate, to form 1-hydroxy-13-O-acetyl-N-methylcanadine.

### Example 20

### Identification of CYP82X1 Reaction Product as 4′-O-Desmethyl-3-O-Acetylpapaveroxine and Narcotoline Hemiacetal

[0463] High-resolution collision-induced dissociation (CID), higher-energy collision-induced dissociation (HCD), and non-collisional pulsed Q dissociation (PQD) analyses were conducted to confirm the identity of the CYP82X1 reaction products by comparison with authentic standards, following procedures as further described in Example 18 and using yeast produced CYP82X1 prepared as described in Example 15. FIG. 16 shows that two CYP82X1 reaction products are produced from the enzymatic substrate (S)-1-hydroxy-13-O-acetyl-N-methylcanadine (m/z 428): 4′-O-desmethyl-3-O-acetylpapaveroxine (m/z 444) and narcotoline hemiacetal (m/z 402). Incubation of the CYP82X1 reaction products with noscapine synthase (NOS) yielded a new compound consistent with narcotoline (m/z 400). Three different ion dissociation methods, high-resolution CID (FIG. 16 A, D, G) and HCD (FIG. 16 B, E, H), and low-resolution PQD (FIG. 16 C, F, I), were used to compare the spectra of the enzymatic reaction product (narcotoline hemiacetal, m/z 402, FIG. 16 A, B, C), the NOS reaction product (m/z 400, FIG. 16 D, E, F), and an authentic standard of narcotoline (m/z 400, FIG. 16 G, H, I). In all cases, fragmentation spectra of the NOS reaction product derived from the CYP82X1 reaction product narcotoline hemiacetal (m/z 402) were identical to corresponding spectra of the authentic standard. The results provided in this Example 20 demonstrate that CYP82X1 is capable of catalyzing a chemical reaction involving the use of 1-hydroxy-13-O-acetyl-N-methylcanadine as a substrate, to form 4′-O-desmethyl-3-O-acetylpapaveroxine and narcotoline hemiacetal.

### Example 21

### Identification of Narcotine Hemiacetal as the Reaction Product of CXE1 and CEX2

[0464] High-resolution collision-induced dissociation (CID), higher-energy collision-induced dissociation (HCD), and non-collisional pulsed Q dissociation (PQD) analyses were conducted to confirm the identity of the CXE1 and CXE2 reaction products by comparison with authentic standards, following procedures as further described in Example 18 and using E. coli produced CXE1 and CXE2 prepared as described in Example 15. FIG. 17 shows three different ion dissociation methods, high-resolution CID (FIG. 17 A, D, G) and HCD (FIG. 17 B, E, H), and low-resolution PQD (FIG. 17 C, F, I) to compare the spectra of the enzymatic substrate (3-O-acetylpapaveroxine, m/z 458, FIG. 17 A, B, C), the CXE1 reaction product (m/z 416, FIG. 17 D, E, F), and an authentic standard of narcotine hemiacetal (m/z 416, FIG. 17 G, H, I). In all cases, fragmentation spectra of the CXE1 reaction product were identical to corresponding spectra of the authentic standard. Identical results were obtained for the CXE2 reaction product. The results provided in this Example 21 demonstrate that CXE1 and CXE2 are capable of catalyzing a chemical reaction involving the use of 3-O-acetylpapaveroxine as a substrate to form narcotine hemiacetal.

### Example 22

### Suppression of CYP82X2, AT1, CYP82X1, CXE1 and CXE2

[0465] Transcript levels of CYP82X1, CYP82X2, AT1, CXE1, and CXE2 in the Bea's Choice chemotype were suppressed using the tobacco rattle virus (TRV) vector system¹². Unique sequences encompassing parts of the 3′-UTR and coding region of CYP82X1 and CYP82X2, and parts of the CXE1 and AT1 coding regions, were amplified using appropriate primers. Amplicons were individually cloned into pTRV2 and vectors were mobilized in Agrobacterium tumefaciens as described previously Dang, T. T. T., Onoyovwi, A., Farrow, S. C. & Facchini, P. J. Methods Enzymol. 515, 231-266 (2012). Apical meristems of two to three week-old seedlings were infiltrated with a 1:1 mixture of A. tumefaciens harboring pTRV1 and constructed pTRV2 containing the gene-specific fragments. Empty pTRV2 was used as a negative control and the pTRV2-PDS construct encoding phytoene desaturase was used as a positive infiltration control (Hileman, L. C., Drea, S., Martino, G., Litt, A., & Irish, V. F. Plant J. 44, 334-341 (2005)). Infiltrated plants were cultivated in the greenhouse for 8-10 weeks. Infiltration with A. tumefaciens, and collection and processing of latex and stem samples for alkaloid and transcript analysis were performed as described previously (Dang, T.-T. T. & Facchini, P. J. J. Biol. Chem. 289, 2013-2026 (2014); Chen, X. & Facchini, P. J. Plant J. 77, 173-184 (2014). Enzyme assays and VIGS experiments were analysed by LC-MS/MS as described previously (Dang, T.-T. T. & Facchini, P. J. J. Biol. Chem. 289, 2013-2026 (2014); Chen, X. & Facchini, P. J. Plant J. 77, 173-184 (2014). Chromatographic and spectral data used for the identification and relative quantification of alkaloids in opium poppy latex following the suppression of CYP82X1, CYP82X2, AT1, or CXE1 by virus-induced gene silencing were determined.

### Example 23

### Suppression of CYP82X2, In-Vivo Production of Noscapine Pathway Intermediates

[0466] CYP82X2 expression was suppressed as described in Example 22 and secondary metabolites were analyzed as described in the same. Shown in FIG. 18 are: (A) a fragment (grey box) of the CYP82X2 cDNA used to assemble the pTRV2 construct. The black box represents the coding region, whereas the black lines are the flanking untranslated regions. Arrows show the annealing sites of primers used for qRT-PCR analysis (FIG. 18A). (B) Ethidium bromide-stained agarose gels showing the detection of the pTRV2 vector by RT-PCR using total RNA extracted from individual plants infiltrated with Agrobacterium tumefaciens harboring the pTRV2-82X2 construct or the pTRV2 empty vector control. PCR primers (TRV2-MCS) were designed to anneal to regions flanking the multiple cloning site (MCS) of pTRV2 (FIG. 18B). (C) Relative CYP82X2 transcript abundance in control (pTRV2) and CYP82X2-silenced (pTRV2-82X2) plants (FIG. 18C). (D) Total ion chromatograms showing the major alkaloid profiles of control (pTRV2) and CYP82X2-silenced (pTRV2-82X2) plants (FIG. 18D). (E) Relative abundance of major latex alkaloids, and other alkaloids showing suppressed levels in CYP82X2-silenced (pTRV2-82X2) plants compared with controls (pTRV2) (FIG. 18E). The results show that, in addition to lower noscapine content, silencing of CYP82X2 causes significant reduction in the levels of several noscapine pathway intermediates, but does not affect the relative abundance of major alkaloids. Asterisks represent significant differences determined using an unpaired, two-tailed Student t test (p<0.05) Furthermore the data provided in this Example 23 are consistent with an accumulation of upstream noscapine pathway intermediates as a result of CYP82X2 gene silencing.

### Example 24

### Suppression of AT1, In-Vivo Production of Noscapine Pathway Metabolites of 1,13-Dihydroxy-N-Methylcanadine

[0467] AT1 expression was suppressed as described in Example 22 and secondary metabolites were analyzed as described in the same. Shown in FIG. 19 are: (A) a fragment (grey box) of the AT1 cDNA used to assemble the pTRV2 construct. The black box represents the coding region, whereas the black lines are the flanking untranslated regions. Arrows show the annealing sites of primers used for qRT-PCR analysis (FIG. 19A). (B) Ethidium bromide-stained agarose gels showing the detection of the pTRV2 vector by RT-PCR using total RNA extracted from individual plants infiltrated with Agrobacterium tumefaciens harboring the pTRV2-AT1 construct or the pTRV2 empty vector control. PCR primers (TRV2-MCS) were designed to anneal to regions flanking the multiple cloning site (MCS) of pTRV2 (FIG. 19B). (C) Relative AT1 transcript abundance in control (pTRV2) and AT1-silenced (pTRV2-AT1) plants (FIG. 19C). (D) Total ion chromatograms showing the major alkaloid profiles of control (pTRV2) and AT1-silenced (pTRV2-AT1) plants (FIG. 19D). (E) Relative abundance of major latex alkaloids, and other alkaloids showing suppressed levels in AT1-silenced (pTRV2-AT1) plants compared with controls (pTRV2) (FIG. 19E). The results show that in addition to lower noscapine content, silencing of AT1 causes a significant increase in the accumulation of canadine, but does not affect the relative abundance of major alkaloids. The AT1 substrate, (S)-1,13-dihydroxy-N-methylcanadine was not detected in control (pTRV2) and AT1-silenced (pTRV2-AT1) plants. Asterisks represent significant differences determined using an unpaired, two-tailed Student t test (p<0.05).

### Example 25

### Suppression of CYP82X1, In-Vivo Production of 1-Hydroxy-13-O-Acetyl-N-Methylcanadine and Upstream Metabolites

[0468] CYP82X1 expression was suppressed as described in Example 22 and secondary metabolites were analyzed as described in the same. Shown in FIG. 20 are: (A) a fragment (grey box) of the CYP82X1 cDNA used to assemble the pTRV2 construct. The black box represents the coding region, whereas the black lines are the flanking untranslated regions. Arrows show the annealing sites of primers used for qRT-PCR analysis (FIG. 20A). (B) Ethidium bromide-stained agarose gels showing the detection of the pTRV2 vector by RT-PCR using total RNA extracted from individual plants infiltrated with Agrobacterium tumefaciens harboring the pTRV2-82X1 construct or the pTRV2 empty vector control. PCR primers (TRV2-MCS) were designed to anneal to regions flanking the multiple cloning site (MCS) of pTRV2 (FIG. 20B). (C) Relative CYP82X1 transcript abundance in control (pTRV2) and CYP82X1-silenced (pTRV2-82X1) plants (FIG. 20 C). (D) Total ion chromatograms showing the major alkaloid profiles of control (pTRV2) and CYP82X1-silenced (pTRV2-82X1) plants (FIG. 20D). (E) Relative abundance of major latex alkaloids, and other alkaloids showing suppressed levels in CYP82X1-silenced (pTRV2-82X1) plants compared with controls (pTRV2) (FIG. 20E). The results show that in addition to lower noscapine content, silencing of CYP82X1 causes significant reduction in the levels of several noscapine pathway intermediates, but does not affect the relative abundance of major alkaloids. Asterisks represent significant differences determined using an unpaired, two-tailed Student t test (p<0.05). Furthermore the data provided in this Example 25 are consistent with accumulation of 1-hydroxy-13-O-acetyl-N-methylcanadine and upstream metabolites as a result of the gene silencing.

### Example 26

### Suppression of CXE1, In-Vivo Production of Noscapine Pathway Metabolites Upstream of 3-O-Acetylpapaveroxine and Metabolites Upstream

[0469] CXE1 expression was suppressed as described in Example 22 and secondary metabolites were analyzed as described in the same. Shown in FIG. 21 are: (A) a fragment (grey box) of the CXE1 cDNA used to assemble the pTRV2 construct. The black box represents the coding region, whereas the black lines are the flanking untranslated regions. Arrows show the annealing sites of primers used for qRT-PCR analysis (FIG. 21 A). (B) Ethidium bromide-stained agarose gels showing the detection of the pTRV2 vector by RT-PCR using total RNA extracted from individual plants infiltrated with Agrobacterium tumefaciens harboring the pTRV2-CXE1 construct or the pTRV2 empty vector control. PCR primers (TRV2-MCS) were designed to anneal to regions flanking the multiple cloning site (MCS) of pTRV2 (FIG. 21 B). (C) Relative CXE1 transcript abundance in control (pTRV2) and CXE1-silenced (pTRV2-CXE1) plants (FIG. 21 C). (D) Total ion chromatograms showing the major alkaloid profiles of control (pTRV2) and CXE1-silenced (pTRV2-CXE1) plants (FIG. 21 D). (E) Relative abundance of major latex alkaloids, and other alkaloids showing suppressed levels in CXE1-silenced (pTRV2-CXE1) plants compared with controls (pTRV2) (FIG. 21 E). The results show, in addition to lower noscapine content, silencing of CXE1 causes a significant increase in the accumulation of several noscapine pathway intermediates, but did not affect the relative abundance of major alkaloids. The increased accumulation of narcotine hemiacetal in CXE1-silenced (pTRV2-CXE1) versus control (pTRV2) plants is likely an artifact caused by non-enzymatic hydrolysis of the acetyl ester of 3-O-acetylpapaveroxine during methanol extraction of latex alkaloids. Asterisks represent significant differences determined using an unpaired, two-tailed Student t test (p<0.05). Furthermore the data provided in this Example 26 are consistent with accumulation of 3-O-acetylpapaveroxine and upstream metabolites as a result of the gene silencing.

[0470] While the present invention has been described with reference to what are presently considered to be the preferred examples, it is to be understood that the invention is not limited to the disclosed examples. To the contrary, the invention is intended to cover various modifications and equivalent arrangements included within the spirit and scope of the appended claims.

TABLE A
Noscapine

| | CYP82Y1 | CYP82X2 | AT1 | CYP82X1 | OMT | CXE1 | NOS (SDR1) |
|---|---|---|---|---|---|---|---|
| [chemical structure] | ✓ | ✓ | ✓ | ✓ | ✓ | ✓ | ✓ |
| [chemical structure] | | ✓ | ✓ | ✓ | ✓ | ✓ | ✓ |
| [chemical structure] | | | ✓ | ✓ | ✓ | ✓ | ✓ |
| [chemical structure] | | | | ✓ | ✓ | ✓ | ✓ |
| [chemical structure] | | | | | ✓ | ✓ | ✓ |
| [chemical structure] | | | | | ✓ | ✓ | ✓ |
| [chemical structure] | | | | | | ✓ | ✓ |
| [chemical structure] | | | | | | | ✓ |
| [chemical structure] | | | | | | | ✓ |

TABLE B
Narcotinohemiacetal

| | CYP82Y1 | CYP82X2 | AT1 | CYP82X1 | OMT | CXE1 |
|---|---|---|---|---|---|---|
| [chemical structure] | ✓ | ✓ | ✓ | ✓ | ✓ | ✓ |
| [chemical structure] | | ✓ | ✓ | ✓ | ✓ | ✓ |
| [chemical structure] | | | ✓ | ✓ | ✓ | ✓ |
| [chemical structure] | | | | ✓ | ✓ | ✓ |
| [chemical structure] | | | | | ✓ | ✓ |
| [chemical structure] | | | | | ✓ | ✓ |
| [chemical structure] | | | | | | ✓ |
| [chemical structure] | | | | | | |

TABLE C
Papaveroxine

| | CYP82Y1 | CYP82X2 | AT1 | CYP82X1 | OMT | CXE1 |
|---|---|---|---|---|---|---|
| [chemical structure] | ✓ | ✓ | ✓ | ✓ | ✓ | ✓ |
| [chemical structure] | | ✓ | ✓ | ✓ | ✓ | ✓ |
| [chemical structure] | | | ✓ | ✓ | ✓ | ✓ |
| [chemical structure] | | | | ✓ | ✓ | ✓ |
| [chemical structure] | | | | | ✓ | ✓ |
| [chemical structure] | | | | | ✓ | ✓ |
| [chemical structure] | | | | | | ✓ |

TABLE D
3-O-acetyl-papaveroxine

| | CYP82Y1 | CYP82X2 | AT1 | CYP82X1 | OMT |
|---|---|---|---|---|---|
| [chemical structure] | ✓ | ✓ | ✓ | ✓ | ✓ |
| [chemical structure] | | ✓ | ✓ | ✓ | ✓ |
| [chemical structure] | | | ✓ | ✓ | ✓ |
| [chemical structure] | | | | ✓ | ✓ |
| [chemical structure] | | | | | ✓ |
| [chemical structure] | | | | | ✓ |

TABLE E
4′-O-desmethyl-3-O-acetyl-papaveroxine

| | CYP82Y1 | CYP82X2 | AT1 | CYP82X1 |
|---|---|---|---|---|
| [chemical structure] | ✓ | ✓ | ✓ | ✓ |
| [chemical structure] | | ✓ | ✓ | ✓ |
| [chemical structure] | | | ✓ | ✓ |
| [chemical structure] | | | | ✓ |
| [chemical structure] | | | | |

TABLE F
1,8-dihydroxy-13-O-acetyl-N-methylcanadine

| | CYP82Y1 | CYP82X2 | AT1 | CYP82X1 |
|---|---|---|---|---|
| [chemical structure] | ✓ | ✓ | ✓ | ✓ |
| [chemical structure] | | ✓ | ✓ | ✓ |
| [chemical structure] | | | ✓ | ✓ |
| [chemical structure] | | | | ✓ |

TABLE G
1-hydroxy-13-O-acetyl-N-methylcanadine

| | CYP82Y1 | CYP82X2 | AT1 |
|---|---|---|---|
| [chemical structure] | ✓ | ✓ | ✓ |
| [chemical structure] | | ✓ | ✓ |
| [chemical structure] | | | ✓ |

TABLE H
1,13-dihydroxy-N-methylcanadine

| | CYP82Y1 | CYP82X2 |
|---|---|---|
| [chemical structure] | ✓ | ✓ |
| [chemical structure] | | ✓ |

TABLE I
1-hydroxy-N-methylcanadine

| | CYP82Y1 |
|---|---|
| [chemical structure] | ✓ |

TABLE J
narcotoline hemiacetal

| | CYP82Y1 | CYP82X2 | AT1 | CYP82X2 | CXE1 (OPTIONAL) |
|---|---|---|---|---|---|
| [chemical structure] | ✓ | ✓ | ✓ | ✓ | ✓ |
| [chemical structure] | | ✓ | ✓ | ✓ | ✓ |
| [chemical structure] | | | ✓ | ✓ | ✓ |
| [chemical structure] | | | | ✓ | ✓ |
| [chemical structure] | | | | | ✓ |
| [chemical structure] | | | | | ✓ |

TABLE K
Narcotoline

| | CYP82Y1 | CYP82X2 | AT1 | CYP82X1 | NOS (SDR1) | CXE1 (OPTIONAL) |
|---|---|---|---|---|---|---|
| [chemical structure] | ✓ | ✓ | ✓ | ✓ | ✓ | ✓ |
| [chemical structure] | | ✓ | ✓ | ✓ | ✓ | ✓ |
| [chemical structure] | | | ✓ | ✓ | ✓ | ✓ |
| [chemical structure] | | | | ✓ | ✓ | ✓ |
| [chemical structure] | | | | | ✓ | ✓ |
| [chemical structure] | | | | | ✓ | ✓ |
| [chemical structure] | | | | | ✓ | |
| [chemical structure] | | | | | ✓ | |

TABLE L

| | |
|---|---|
| Nucleic Acid | SEQ. ID NO |

Papaver somniferum

| | |
|---|---|
| CYP82Y1 | 1 |
| CYP82X2 | 3 |
| AT1 | 5, 19, 248 |
| CYP82X1 | 7 |
| OMT | 9, 17, 516, 518, 520, |
| | 522, 524, 526, 528, |
| | 530, 532, 534, 536, |
| | 538, 540, 542, 544, |
| | 546, 548, 550, 552, |
| | 554, 556, 558 |
| CXE 1 | 11, 307 |
| CXE 2 | 15, 308 |
| NOS | 13 |

Cissampelos mucronata

| | |
|---|---|
| CYP82 | 39, 40, 41 |
| AT | 232 |
| CXE | 284, 285 |
| OMT | 442, 443 |
| NOS | |

Eschscholzia californica

| | |
|---|---|
| CYP82 | 42, 43, 44, 45, 46, 47, |
| | 48, 49, 50 |
| AT | 234 |
| CXE | 287 |
| OMT | 446, 447 |
| NOS | 367 |

Jeffersonia diphylla

| | |
|---|---|
| CYP82 | 69, 70 |
| AT | 238 |
| CXE | 292 |
| OMT | 452, 453 |
| NOS | 375, 376, 377 |

Nandina domestica

| | |
|---|---|
| CYP82 | 78, 79, 80 |
| AT | 241 |
| CXE | 297, 298 |
| OMT | 458, 459 |
| NOS | 380, 381 |

Sanguinaria canadensis

| | |
|---|---|
| CYP82 | 95, 96, 97, 98, 99, 100, |
| | 101, 102, 103, 104, |
| | 105, 106 |
| AT | 249 |
| CXE | 309, 310 |
| OMT | 464, 465 |
| NOS | 384, 385, 386, 387 |

Tinospora cordifolia

| | |
|---|---|
| CYP82 | 113, 114, 115, 116 |
| AT | 252 |
| CXE | 312, 313, 314 |
| OMT | 468, 469 |
| NOS | |

Papaver bracteatum

| | |
|---|---|
| CYP82Y1 | 88 |
| CYP82 | 89, 91, 92, 93, 94 |
| AT | 243, 244, 245, 246, 247 |
| CYP82X1 | 90 |
| OMT | 462, 463, 559, 560, |
| | 561, 562, 563, 564, |
| | 565, 566, 567, 568, |
| | 569, 570, 571, 572, |
| | 573, 574, 575, 576, |
| | 577, 578 |
| CXE | 304, 305, 306 |
| NOS | |

Cocculus trilobus

| | |
|---|---|
| CYP82 | |
| AT | 233 |
| CXE | 286 |
| OMT | 444, 445 |
| NOS | |

Glaucium flavum

| | |
|---|---|
| CYP82 | 51, 52, 53, 54, 55, 56, |
| | 57, 58 |
| AT | 235, 236 |
| CXE | 288 |
| OMT | 448, 449 |
| NOS | 368, 369, 370, 371 |

Mahonia aquifolium

| | |
|---|---|
| CYP82 | 71, 72 |
| AT | 239 |
| CXE | 293 |
| OMT | 454, 455 |
| NOS | |

Nigella sativa

| | |
|---|---|
| CYP82 | 81, 82, 83, 84, 85, 86, |
| | 87 |
| AT | 242 |
| CXE | 299, 300, 301, 302, 303 |
| OMT | 460, 461 |
| NOS | 382, 430, 383 |

Stylophorum diphyllum

| | |
|---|---|
| CYP82 | 107, 108, 109, 110, |
| | 111, 112, |
| AT | 250, 251 |
| CXE | 311 |
| OMT | 466, 467 |
| NOS | 388, 389, 390 |

Xanthoriza simplicissima

| | |
|---|---|
| CYP82 | 118, 119, 120, 121, |
| | 122, 123 |
| AT | 254 |
| CXE | 316, 317, 318 |
| OMT | 472, 473 |
| NOS | |

Chelidonium majus

| | |
|---|---|
| CYP82 | 33, 34, 35, 36, 37, 38 |
| AT | 229, 230, 231 |
| CXE | 283 |
| OMT | 440, 441 |
| NOS | 364, 365, 366 |

Chordyalis chelanthifolia

| | |
|---|---|
| CYP82 | 25, 26, 27, 28, 29, 30, |
| | 31, 32 |
| AT | 228 |
| CXE | |
| OMT | 438, 439 |
| NOS | 358, 359, 360, 361, |
| | 362, 363 |

Hydrastis canadensis

| | |
|---|---|
| CYP82 | 59, 60, 61, 62, 63, 64, |
| | 65, 66, 67, 68 |
| AT | 237 |
| CXE | 289, 290, 291 |
| OMT | 450, 451 |
| NOS | 372, 373, 374 |

Menispermum canadense

| | |
|---|---|
| CYP82 | 73, 74, 75, 76, 77 |
| AT | 240 |
| CXE | 294, 295, 296 |
| OMT | 456, 457 |
| NOS | 378, 379 |

Berberis thunbergii

| | |
|---|---|
| CYP82 | 23, 126 |
| AT | 227 |
| CXE | 282 |
| OMT | 436, 437 |
| NOS | 355, 356, 357 |

Thalictrum flavum

| | |
|---|---|
| CYP82 | 117 |
| AT | 253 |
| CXE | 315 |
| OMT | 470, 471 |
| NOS | |

Argemone mexicana

| | |
|---|---|
| CYP82 | 21, 22 |
| AT | 514 |
| CXE | 281 |
| OMT | 434, 435 |
| NOS | 353, 354 |

TABLE M

| | |
|---|---|
| Protein | SEQ. ID NO |

Papaver somniferum

| | |
|---|---|
| CYP82Y1 | 2 |
| CYP82X2 | 4 |
| AT1 | 6, 20, 431 |
| CYP82X1 | 8 |
| OMT | 10, 18, 515, 517, 519, |
| | 521, 523, 525, 527, |
| | 529, 531, 533, 535, |
| | 537, 539, 541, 543, |
| | 545, 547, 549, 551, |
| | 553, 555, 557 |
| CXE 1 | 12, 432 |
| CXE 2 | 16, 433 |
| NOS | 14 |

Cissampelos mucronata

| | |
|---|---|
| CYP82 | 142, 143, 144 |
| AT | 261 |
| CXE | 322, 323 |
| OMT | 482, 483 |
| NOS | |

Eschscholzia californica

| | |
|---|---|
| CYP82 | 145, 146, 147, 148, |
| | 149, 150, 151, 152, 153 |
| AT | 263 |
| CXE | 325 |
| OMT | 486, 487 |
| NOS | 405 |

Jeffersonia diphylla

| | |
|---|---|
| CYP82 | 172, 173 |
| AT | 267 |
| CXE | 329 |
| OMT | 492, 493 |
| NOS | 413, 414, 415 |

Nandina domestica

| | |
|---|---|
| CYP82 | 181, 182, 183 |
| AT | 270 |
| CXE | 333, 334 |
| OMT | 498, 499 |
| NOS | 418, 419 |

Sanguinaria canadensis

| | |
|---|---|
| CYP82 | 198, 199, 200, 201, |
| | 202, 203, 204, 205, |
| | 206, 207, 208, 209 |
| AT | 277 |
| CXE | 343, 344 |
| OMT | 504, 505 |

Tinospora cordifolia

| | |
|---|---|
| NOS | 423, 424, 425, 426 |
| CYP82 | 216, 217, 218, 219 |
| AT | 278 |
| CXE | 346, 347, 348 |
| OMT | 508, 509 |
| NOS | |

Papaver bracteatum

| | |
|---|---|
| CYP82Y1 | 191 |
| CYP82 | 192, 194, 195, 196, 197 |
| AT | 272, 273, 274, 275, 276 |
| CYP82X1 | 193 |
| OMT | 502, 503, 579, 580, |
| | 581, 582, 583, 584, |
| | 585, 586, 587, 588, |
| | 589, 590, 591, 592, |
| | 593, 594, 595, 596, |
| | 597, 598 |
| CXE | 340, 341, 342 |
| NOS | |

Cocculus trilobus

| | |
|---|---|
| CYP82 | |
| AT | 262 |
| CXE | 324 |
| OMT | 484, 485 |
| NOS | |

Glaucium flavum

| | |
|---|---|
| CYP82 | 154, 155, 156, 157, |
| | 158, 159, 160, 161 |
| AT | 264, 265 |
| CXE | 326 |
| OMT | 488, 489 |
| NOS | 406, 407, 408, 409 |

Mahonia aquifolium

| | |
|---|---|
| CYP82 | 174, 175 |
| AT | 268 |
| CXE | |
| OMT | 494, 495 |
| NOS | |

Nigella sativa

| | |
|---|---|
| CYP82 | 184, 185, 186, 187, |
| | 188, 189, 190 |
| AT | 271 |
| CXE | 335, 336, 337, 338, 339 |
| OMT | 500, 501 |
| NOS | 420, 421, 422 |

Stylophorum diphyllum

| | |
|---|---|
| CYP82 | 210, 211, 212, 213, |
| | 214, 215 |
| AT | |
| CXE | 345 |
| OMT | 506, 507 |
| NOS | 427, 428, 429 |

Xanthoriza simplicissima

| | |
|---|---|
| CYP82 | 221, 222, 223, 224, |
| | 225, 226 |
| AT | 280 |
| CXE | 350, 351, 352 |
| OMT | 512, 513 |
| NOS | |

Chelidonium majus

| | |
|---|---|
| CYP82 | 136, 137, 138, 139, |
| | 140, 141 |
| AT | 258, 259, 260 |
| CXE | 321 |
| OMT | 480, 481 |
| NOS | 402, 403, 404 |

Chordyalis chelanthifolia

| | |
|---|---|
| CYP82 | 128, 129, 130, 131, |
| | 132, 133, 134, 135 |
| AT | 228, 257 |
| CXE | |
| OMT | 478, 479 |
| NOS | 396, 397, 398, 399, |
| | 400, 401 |

Hydrastis canadensis

| | |
|---|---|
| CYP82 | 162, 163, 164, 165, |
| | 166, 167, 168, 169, |
| | 170, 171 |
| AT | 266 |
| CXE | 327, 328 |
| OMT | 490, 491 |
| NOS | 410, 411, 412 |

Menispermum canadense

| | |
|---|---|
| CYP82 | 176, 177, 178, 179, 180 |
| AT | 269 |
| CXE | 330, 331, 332 |
| OMT | 496, 497 |
| NOS | 416, 417 |

Berberis thunbergii

| | |
|---|---|
| CYP82 | 24, 127 |
| AT | 256 |
| CXE | 320 |
| OMT | 476, 477 |
| NOS | 393, 394, 395 |

Thalictrum flavum

| | |
|---|---|
| CYP82 | 220 |
| AT | 279 |
| CXE | 349 |
| OMT | 510, 511 |
| NOS | |

Argemone mexicana

| | |
|---|---|
| CYP82 | 124, 125 |
| AT | 255 |
| CXE | 319 |
| OMT | 474, 475 |
| NOS | 391, 392 |

1: A method of making noscapine or a noscapine synthesis intermediate comprising:
(a) providing a noscapine pathway precursor selected from a first canadine derivative, a first papaveroxine derivative and narcotine hemiacetal; and
(b) contacting the noscapine pathway precursor with at least one of the enzymes selected from the group of enzymes consisting of (i) CYP82Y1; (ii) CYP82X2; (iii) AT1; (iv) CYP82X1; (v) OMT; (vi) CXE1; and (vii) NOS under reaction conditions permitting the catalysis of the noscapine pathway precursor to form noscapine or the noscapine synthesis intermediate wherein the noscapine intermediate is a second canadine derivative, a first or second papaveroxine derivative, narcotine hemiacetal or noscapine;
and
wherein the first canadine derivative has the chemical formula (I): [chemical structure]
wherein R₁ represents a hydrogen atom, hydroxyl; or O-acetyl;
wherein R₂ represents a hydrogen atom or hydroxyl; and
wherein R₃ represents a hydrogen atom or hydroxyl;
wherein the second canadine derivative has the chemical formula (II): [chemical structure]
wherein R₄ represents a hydrogen atom, hydroxyl; or O-acetyl; and
wherein R₅ represents a hydrogen atom or hydroxyl; and
wherein the first and second papaveroxine derivative have the chemical formula (III): [chemical structure]
wherein R₆ represents hydroxyl or methoxy; and
wherein R₇ represents hydroxyl or O-acetyl.

2: The method according to claim 1 wherein the first canadine derivative is selected from the group of canadine derivatives consisting of (S)—N-methylcanadine; 1-hydroxy-N-methylcanadine; 1,13-dihydroxy-N-methylcanadine, 1-hydroxy-13-O-acetyl-N-methylcanadine; and 1,8-dihydroxy-13-O-acetyl-N-methylcanadine; and wherein the second canadine derivative is selected from the group of canadine derivatives consisting of 1-hydroxy-N-methylcanadine; 1,13-dihydroxy-N-methylcanadine, 1-hydroxy-13-O-acetyl-N-methylcanadine; and 1,8-dihydroxy-13-O-acetyl-N-methyl canadine; and wherein the first and second papaveroxine derivatives are selected from the group of papaveroxine derivatives consisting of 4′-O-desmethoxy-3-O-acetyl-papaveroxine; papaveroxine; or 3-O-acetyl-papaveroxine.

3: A method of making noscapine comprising:
(a) providing a noscapine pathway precursor selected from a canadine derivative, a papaveroxine derivative or narcotine hemiacetal; and
(b) contacting the noscapine pathway precursor with at least one of the enzymes selected from the group of enzymes consisting of (i) CYP82Y1; (ii) CYP82X2; (iii) AT1; (iv) CYP82X1; (v) OMT; (vi) CXE1; and (vii) NOS under reaction conditions permitting the catalysis of the noscapine pathway precursor to form noscapine;
and wherein the canadine derivative has the chemical formula (I): [chemical structure]
wherein R₁ represents a hydrogen atom, hydroxyl; or O-acetyl;
wherein R₂ represents a hydrogen atom or hydroxyl; and
wherein R₃ represents a hydrogen atom or hydroxyl;
and wherein the papaveroxine derivative has the chemical formula (III): [chemical structure]
wherein R₆ represents hydroxyl or methoxy; and
wherein R₇ represents hydroxyl or O-acetyl.

4: A method of making noscapine according to claim 3 wherein the noscapine pathway precursor is (S)—N-methylcanadine; and the enzymes are (i) CYP82Y1; (ii) CYP82X2; (iii) AT1; (iv) CYP82X1; (v) OMT; (vi) CXE1; and (vii) NOS.

5: A method of making noscapine according to claim 3 wherein the noscapine pathway precursor is 1-hydroxy-N-methylcanadine; and the enzymes are (i) CYP82X2; (ii) AT1; (iii) CYP82X1; (iv) OMT; (v) CXE1; and (vi) NOS.

6: A method of making noscapine according to claim 3 wherein the noscapine pathway precursor is 1,13-dihydroxy-N-methylcanadine; and the enzymes are (i) AT1; (ii) CYP82X1; (iii) OMT; (iv) CXE1; and (v) NOS.

7: A method of making noscapine according to claim 3 wherein the noscapine pathway precursor is 1-hydroxy-13-O-acetyl-N-methylcanadine; and the enzymes are (I) CYP82X1; (ii) OMT; (iii) CXE1; and (iv) NOS.

8: A method of making noscapine according to claim 3 wherein the noscapine pathway precursor is 1,8-dihydroxy-13-O-acetyl-N-methylcanadine; and the enzymes are (i) OMT; (ii) CXE1; and (iii) NOS.

9: A method of making noscapine according to claim 3 wherein the noscapine pathway precursor is 4′-O-desmethoxy-3-O-acetyl-N-papaveroxine; and the enzymes are (1) OMT; (ii) CXE1; and (iii) NOS.

10: A method of making noscapine according to claim 3 wherein the noscapine precursor is 3-O-acetyl-N-papaveroxine; and the enzymes are (i) CXE1; and (ii) NOS.

11: A method of making noscapine according to claim 3 wherein the noscapine pathway precursor is papaveroxine; and the enzyme is NOS.

12: A method of making noscapine according to claim 3 wherein the noscapine pathway precursor is narcotine hemiacetal; and the enzyme is NOS.

13-55. (canceled)

56: The method according to claim 1 wherein the reaction conditions are in vitro reaction conditions.

57: The method according to claim 1 wherein the reaction conditions are in vivo reaction conditions.

58: A method for preparing noscapine and/or one or more of the noscapine synthesis intermediates selected from the group of noscapine synthesis intermediates consisting of: 1-hydroxy-N-methylcanadine; 1,13-dihydroxy-N-methylcanadine; 1-hydroxy-O-acetyl-N-methylcanadine; 1,8-dihydroxy-13-O-acetyl-N-methylcanadine; 4′-O-desmethoxy-3-O-acetyl-papaveroxine; 3-O-acetyl-papaveroxine; papaveroxine; and narcotine hemiacetal comprising:
(a) providing a chimeric nucleic acid sequence comprising in the 5′ to 3′ direction of transcription as operably linked components:
(i) one or more nucleic acid sequences encoding one or more of the polypeptides selected from the group of polypeptides consisting of CYP82Y1; CYP82X2; AT1; CYP82X1; OMT; CXE1 and NOS; and
(ii) one or more nucleic acid sequences capable of controlling expression in a host cell;
(b) introducing the chimeric nucleic acid sequence into a host cell and growing the host cell to produce the polypeptide selected from the group of polypeptides consisting of CYP82Y1; CYP82X2; AT1; CYP82X1; OMT; CXE1 and/or NOS and to produce one or more of noscapine or the noscapine synthesis intermediate; and
(c) recovering noscapine or the noscapine synthesis intermediate.

59-70. (canceled)

71: The method according to claim 58 wherein the method is a method for preparing noscapine, and the enzymes are (i) CYP82X1; (ii) OMT; (iii) CXE1; and (iv) NOS.

72: The method according to claim 58 wherein the method is a method for preparing noscapine, and the enzymes are (i) OMT; (ii) CXE1; and (iii) NOS.

73: The method according to claim 58 wherein the method is a method for preparing noscapine, and the enzymes are (i) OMT; (ii) CXE1; and (iii) NOS.

74: The method according to claim 58 wherein the method is a method for preparing noscapine, and the enzymes are (i) CXE1; and (ii) NOS.

75: The method according to claim 58 wherein the method is a method for preparing noscapine; and the enzyme is NOS.

The application's sequence listing, which the Patent Office published only in electronic form, follows.

SEQUENCE LISTING (598 sequences)

SEQ ID NO: 1 - DNA, 1875 bp, Papaver somniferum
tttcagttcattcatggcgtatttgatgatcaagaagtctatctatttgttttttgatcaaccaactgcagttggcactcttatacttgcttttctgctgacactttcgcctgttattatttactatgaacagaagaagaggggtttgaggcgaaatcgcaccgcaattacaacgactccattaccagaggcatcaggtgcatggccagtgataggtcatcttcttcttttcatgaacgaaaacgatctaaatcatgtaactcttggtcacatggctgataaatatggacctattttcagcttaagattcggtagtcatagaactctagttgttagtagttgggagatggtaaaggagtgttttacaggtaccaatgacaagttgttctcaaatcgtccttcctccttggcggttaaacttatgttttatgacactgaatcttatggttttgcaccttatgggaaatactggagagagttgcgaaagatatctacacacaaactcctctctaatcagcaattagagaagttcaagcacttgcggatttctgaagtcgataactcctttaaaaagcttcatgagttatgcagcaacaacaaacagggaggtgatactacatatgtggctagtcttgtgagaatggatgattggttcgcgtacttgacatttaacgtaataggacggatcgtcagcggattccaatcaaatgcagtggcaggtgccacaaacagccaggaaaaatacaagcttgcaatcgatgaagtgtcaaatcttatggcaacgtttgccgtttcagatgtggttccacggcttgggtggattgatcgattgactggtcttacaggaaagatgaagaattgtggtaaaaaattagatgcagtagttggggatgcagtggaggatcatcgccaaaagaaactcaaaatttctagaaataacacaggagcacttacggagcacgaagaagaagactttatcgatgtttgcttgtcgattatggagcagtcacagattccgggaaaccaccccgaaatctctgtcaaatctattgccttggacatgttatcgggtgggagtgacactacaaaattgataatgacatggaccctttctttgctgttgaaccatccagacatattggacaaggctaaagaagaagtagatacatacttcgggaagaaaaagatatcggataacacacctgtggttgatgctgccgatgttcctaacctcgtctacatccaagcaatcatcaaagaatcaatgcggttataccctgctagcacattgatggagcgaatgacaagtgatgattgtgatgttggtggcttccacgtaccagctgggacacgattatgggttaacgtatggaagatgcaacgggacccaagggtgtggaaagatccactggtatttctacctgagagattcttgagcaatgacaaagggatggtagatgtgaagggtcagaattatgaactgataccatttggaacaggcaggcggatatgtcctggtgcatcttttgccttggaagtcttgcatttggttcttactcgtcttattcttgagttcgagatgaaggcaccagaggggaaaattgacatgagggcaagaccaggttttttccacaacaaggtggtgccactagatgttcaactcaccccacgcacactagattaagattcctatatatgctaattaattagatgaataaaatctgtggtcgagtaaatctaattaatgctaatgaacaagatgaataaaaaattttctttctgcttttgctttggttagggttatttgaccctcatttggttgtattcgttggcgcacaacttttgtgcttcttaatataattccttttggtggat

SEQ ID NO: 2 - protein, 556 aa, Papaver somniferum
MAYLMIKKSIYLFFDQPTAVGTLILAFLLTLSPVIIYYEQKKRGLRRNRTAITTTPLPEASGAWPVIGHLLLFMNENDLNHVTLGHMADKYGPIFSLRFGSHRTLVVSSWEMVKECFTGTNDKLFSNRPSSLAVKLMFYDTESYGFAPYGKYWRELRKISTHKLLSNQQLEKFKHLRISEVDNSFKKLHELCSNNKQGGDTTYVASLVRMDDWFAYLTFNVIGRIVSGFQSNAVAGATNSQEKYKLAIDEVSNLMATFAVSDVVPRLGWIDRLTGLTGKMKNCGKKLDAVVGDAVEDHRQKKLKISRNNTGALTEHEEEDFIDVCLSIMEQSQIPGNHPEISVKSIALDMLSGGSDTTKLIMTWTLSLLLNHPDILDKAKEEVDTYFGKKKISDNTPVVDAADVPNLVYIQAIIKESMRLYPASTLMERMTSDDCDVGGFHVPAGTRLWVNVWKMQRDPRVWKDPLVFLPERFLSNDKGMVDVKGQNYELIPFGTGRRICPGASFALEVLHLVLTRLILEFEMKAPEGKIDMRARPGFFHNKVVPLDVQLTPRTLD

SEQ ID NO: 3 - DNA, 2313 bp, Papaver somniferum
aaacacttgagtcatgccttgatatgctcatattttagtttgtcatattcactataactataaatttcaatacaatttctaaaactcatcatcattcaagagagatacaaataccttgatatccttttatcatcaatggagttattcataaagttaccatttatccaaccaattcctttcagtattattcttgttactacagtttcgattgttctattatacagtgtcttcttctgggttactgataagaaaaagaagaggaagaaagcaccaaatgctgcaggggcatggccgttaataggtcatctccgtctattgatgaacgacaaggaaccgttgtatagagcactagggagcatggctgataagtacggacctgcattcaacatccgattaggtaaccaagaagttcttgttgtgagtaactgggagatggtaaaacagtgttttggtaatcaaaatgataagctattttcgaatcgtcaaactacattagctgcaaaatacatgcttaatcaaacaacttctagcggattcgcaccatatggaccatattggagagagctacgaaagataatggtgcagcaattactctctaaacaatctttagaatcgtggaaacatctgaaaatcaaagagatggatgcttcatttagtaaacttaacgagttatgcaacaacaacggtactggaacagctaccctaattaggatggacgaatggtttgctgagttgacgttcaacgtgatcgcaagaaatgtctttggctaccaaagtggcggaaggtcgacagcgcttacgaacggagatacggaatcaaagggcgagaggtacaagaaaacattggaagaagcacttcatcttatgtcaatttttgcagtttcagacatatttccaagtctagagtgggtagatcggttaagaggccttataaggaatatgaaacgctttggagatgagctaaattcaattgcagggtgtcttattgaagagcaccgccaaaagagattacaatccgtatctaaaagtgataaaggagttggtgatgaacaagacttcgttgatgttctcttatcggttgctgaaaaatcgcaacttcctggagatgaccctgatttggtcatcaagtctatgattctggaaatcgtatcaggtgggagtgagaccacatcgtcaaccttaacttgggccctctgtctgttactgaaccatccgcatgtgttaaagaaggcaaaagaggaattagatacgcacgtaggaaaagataggcatgtagaagagtcagatacccctaagctcgtgtacattaatgcaattatcaaagaatcaatgcgattgtatccaaacggggcaatgcttgatcggttggcgttagaagagtgcgaagttggtggatttcatgtaccggccgggggacgcttatttgtcaatgtttggaagattcagagagatccgagtgtttgggagaatcctctggagtttaaaccagagaggtggtttttgagtaatggtgaaaagatggatgtggattacaaaggtcacaatcatgaattcataccatttgggataggtcggaggatgtgcgctggtatgctttgggcatcggaggtgattcatttggtgctgccccgtcttattcatgggtttgatatgaaagcagcaagtgccaatgggaaagtagatatggcagaaatggcaggcatggtgatttgttttaagaagacacctcttgaagttatggtcaatcctcgagagtagatgttttttttccttttgcatagtttatatattgaaaatgtaggccaagctagcaacctgtcgtacatttgacacaagatttttaagttcgtcaccatgttaaaagtctgtttgtttggttttttctcatagaaattttaatttatgctcctctaatttgtttcttatcatgcgagtactttgagtaactcagttactttgatgctttttgctggtaacacatcagagtgacgaagttagatgctgatacagacggagccagggattatacacccccagattttttgattcttgttttggtggaggatgtaaggggaagggtccctagaaaaacgtttaaacttagtctatgagtcatggttgcaggttcttggatatgaagtggaatatctaggtattctaaacttgagtttagagagacagatattgttgtcagatacttgaagttcagagagacagatattgttgtcaaagatctatgcttgcatgattgcatcctaaacaattttgatgcgaataatgtatacaaacgcgaatttaactcgtgcatttacg

SEQ ID NO: 4 - protein, 540 aa, Papaver somniferum
MELFIKLPFIQPIPFSIILVTTVSIVLLYSVFFWVTDKKKKRKKAPNAAGAWPLIGHLRLLMNDKEPLYRALGSMADKYGPAFNIRLGNQEVLVVSNWEMVKQCFGNQNDKLFSNRQTTLAAKYMLNQTTSSGFAPYGPYWRELRKIMVQQLLSKQSLESWKHLKIKEMDASFSKLNELCNNNGTGTATLIRMDEWFAELTFNVIARNVFGYQSGGRSTALTNGDTESKGERYKKTLEEALHLMSIFAVSDIFPSLEWVDRLRGLIRNMKRFGDELNSIAGCLIEEHRQKRLQSVSKSDKGVGDEQDFVDVLLSVAEKSQLPGDDPDLVIKSMILEIVSGGSETTSSTLTWALCLLLNHPHVLKKAKEELDTHVGKDRHVEESDTPKLVYINAIIKESMRLYPNGAMLDRLALEECEVGGFHVPAGGRLFVNVWKIQRDPSVWENPLEFKPERWFLSNGEKMDVDYKGHNHEFIPFGIGRRMCAGMLWASEVIHLVLPRLIHGFDMKAASANGKVDMAEMAGMVICFKKTPLEVMVNPRE

SEQ ID NO: 5 - DNA, 1572 bp, Papaver somniferum
cgcatataatccaatttgcattgtttatcgaccttgaggaacaattaggggatatggcaacaatgtctagtgctgctgtagaagtgatctcgaaagaaacgattaaaccaagaaatccaacaccatatcaacttagaaactacaatatgtcacttctcgaccaatattcttctctagtttatgttccgatcattcttttctaccctgctgcctccgacgctaatagtaccggaagtaagcaccatgatgatcttcacttgcttaagaggtctctttctgaaacgctagttcacttttatccaatggctggtaggatgaaagacaacatgactgttgactgtaacgacgaaggtattgactttttcgaagtaagaatcaaaggtagaatgtgtgacttcatgatgaaatcagatgcacacttaagtctgcttcttccgtctgaagtcgcttccacgaacttcgtgaaggaagcacaggtgattgttcaagtgaacatgtttgattgcggtggaactgccatttgtttctgtatatcaaacaagattgcagatgcatgcaccatgattaccttcattcgtagtttggcaggcaccaccaacatagctcgtcgtgggagctctattgctgcaccaaccacaaatcagaatttggttccttctttcgattcgacatcactctttccacctagtgaacaattggcatctcaagtttcctatcctacacaggatagtaccagcgtagataaacttgtcagcaaaagatttgtgtttgatgcggcaaagattacatctgcacgtgaaaaattgcaatccttgatgcatgataaatacaaatgccataggccgacaagggttgaggtagtttccgctttgatatggaagtcagcagtgaaatctgctccgcccggttctatatccactgtaacccatgccatgaactttagaaagaaaatggatccaccattacaagatgcgtcattcgggaatctttgtgtggttgttacagcagtattaccagcaacaacggcgacaacaacaaatccagcaaccaaaaaagttagtagtacgagtaatgaagagcaagtggcacttgatgagttaagtgattttgtagccctattgaggcgcgaaatagataaggtaaagggtgataaaggttgcatggagaaaatcattcaaaagttcatctatggtcatgatgcttccgtagcgaaagacagtgatgttgaagataaggtgacagctttgtttatgactagctggtgcaagtttggattctacgaagctgattttggttggggaacgccagtttgggtaactactgttccattaattgagccaaagtacaagaacatggttttcatgaacgatatgaaatgtggtgaaggaattgaagtgtgggtgaattttctggaggatgatatgaccaagttcgaacaccacctaagagagatcctccaactgttttgattttcaaccgtttccctaatagaggtcaattgtcgtgtttgtccatcttaactaccatctttattctcttgttttcatacttgtatttgtcttactccggtaa

SEQ ID NO: 6 - protein, 471 aa, Papaver somniferum
MATMSSAAVEVISKETIKPRNPTPYQLRNYNMSLLDQYSSLVYVPIILFYPAASDANSTGSKHHDDLHLLKRSLSETLVHFYPMAGRMKDNMTVDCNDEGIDFFEVRIKGRMCDFMMKSDAHLSLLLPSEVASTNFVKEAQVIVQVNMFDCGGTAICFCISNKIADACTMITFIRSLAGTTNIARRGSSIAAPTTNQNLVPSFDSTSLFPPSEQLASQVSYPTQDSTSVDKLVSKRFVFDAAKITSAREKLQSLMHDKYKCHRPTRVEVVSALIWKSAVKSAPPGSISTVTHAMNFRKKMDPPLQDASFGNLCVVVTAVLPATTATTTNPATKKVSSTSNEEQVALDELSDFVALLRREIDKVKGDKGCMEKIIQKFIYGHDASVAKDSDVEDKVTALFMTSWCKFGFYEADFGWGTPVWVTTVPLIEPKYKNMVFMNDMKCGEGIEVWVNFLEDDMTKFEHHLREILQLF

SEQ ID NO: 7 - DNA, 2156 bp, Papaver somniferum
aaaaaacaaaacaacctcaatctagctagagtcgtgaaaaagttttgtgcgactgttatttagttaattataaaatttcaatgaagtcgttaatgatgaacaagttattatttctccaacggattactgattctccttcgaccaccattatcagtacttttattgttacaataatatccattgtttttctctacactgtcttgttgataaggacgactaagaataagcagaagatagcagcaccaaaagcatcgggggcgtggccgttcataggtcatctcaaactattcatgaaacaagatactcagttttacagaactctaggaaccatgtctgataaatacgggtcggtgttcacacttcgattaggaaaccaagcaatcctagttgtgagcaactgggagatggtaaaagaatgtttcacaacaaacgacaagtcattctcgaatcgtccaagtacgttaagcactaaatacatgctgaatgacactaattctgtcgtgttttcaccttacggaacgtattggagagaaatgcggaagatattggtgcaaaaactactgatctctaaccaaagatcagaggcattgaaaaatctgaaaacgaaagaaatcgacaactcgtttgtaaagcttaatgatttatgcaacaacgatgtcagtggaggaggcacaaaagttaggatggacgaatggttggctgacatgatgttcaacattattgctaggattacatttggttaccaaagcggaggaggcgatgcacctggcgcttctacaacatccaagaatgtcgagagatacaagaaaacgttggacgagatgtttgttgttttagcgacgaggtttgcagtttcagatatatttccatctctggagtttatagaccgattgagaggtcttgtaaaggatatgaaaatcttgggagacgaattaaactccattgctggatgttttattgaagaacatcgtcaaaagagacgagaatcattatcctcattgttatctttgtcaaatgaatccgttggtgatgaacaagatttcattgatgttctcttgtcaataatggatcagtcacggcttcccggagatgacccagattttattatcaaaattatgatcctggaagcttttgcaggtgggacggacagtttaagtgcaaccttaacttgggtcctctctctactgctgaaccacccaaacgtgttaaagagggcaagggaggaaatagataggcatgtggaaaacggtaagcaagtggaagtgtctgatattccgaagctcggatacattgatgcaataatcaaagagacgatgagattgtatccagtcggagcattaagcgaacgatacacgactgaagaatgcgaggttggtcggtttaacgtacccgctggcacacgcttactggtgaatatatggaagatccacagagacccaagtgtgtgggagaatccatcagattttcaaccagagaggtttttgtgcagcgataaggtgggtgtggatttatatggccagaattatgagctgataccatttggggccggtaggagggtatgtccggctatagtttcatcactgcagacgatgcattatgcgttggcgcgtcttattcaaggatatgaaatgaaatcagccagcctcgatgggaaggtgaatatggaagaaatgatagccatgtcgtgccacaagatgagccctcttgaagttattatcagtcctcgggagccgaggcggagttaaatcttatgttccaattttacattagcatctttgattatgaaatgtattgctcttaagtttctttttgttttttatatttttaagcttgtatgtgatcatcagcgaaaatgatgatgacagaatcgtcaaaagaatcaatcgaacaagctatgttgtattaggcgcgccgaggaaaaattagaaaactgcacgaacaggtatgatttggcgcgttttattataggcgctccctgagcgcctggcacgcctaaaacacttaggtgagcactcagggcacctttttttctagccgtttcctgagcgtctcgcgcgcctagaacacttaggcgagcacccaggacgccttttacaacgtagagaacaagccttaataaacgaaatggattctttgaattcaaatttaagtggcac

SEQ ID NO: 8 - protein, 554 aa, Papaver somniferum
MKSLMMNKLLFLQRITDSPSTTIISTFIVTIISIVFLYTVLLIRTTKNKQKIAAPKASGAWPFIGHLKLFMKQDTQFYRTLGTMSDKYGSVFTLRLGNQAILVVSNWEMVKECFTTNDKSFSNRPSTLSTKYMLNDTNSVVFSPYGTYWREMRKILVQKLLISNQRSEALKNLKTKEIDNSFVKLNDLCNNDVSGGGTKVRMDEWLADMMFNIIARITFGYQSGGGDAPGASTTSKNVERYKKTLDEMFVVLATRFAVSDIFPSLEFIDRLRGLVKDMKILGDELNSIAGCFIEEHRQKRRESLSSLLSLSNESVGDEQDFIDVLLSIMDQSRLPGDDPDFIIKIMILEAFAGGTDSLSATLTWVLSLLLNHPNVLKRAREEIDRHVENGKQVEVSDIPKLGYIDAIIKETMRLYPVGALSERYTTEECEVGRFNVPAGTRLLVNIWKIHRDPSVWENPSDFQPERFLCSDKVGVDLYGQNYELIPFGAGRRVCPAIVSSLQTMHYALARLIQGYEMKSASLDGKVNMEEMIAMSCHKMSPLEVIISPREPRRS

SEQ ID NO: 9 - DNA, 1520 bp, Papaver somniferum
cttcgagaaaaattagaataaaaatcatactgcctttatttttagaaaagagataccgttaccttttaattttggtcgtggagttgaggcttgcctcttggtctagaaaaaaaaatctctataaatagcattaattctaccatttttataagtctcattgttgatattgaatcagaaactttcttctaaaatctttcaataccagtactgttagtttccgataagagccacactaatccattatggaaattcatttagaaagccaagaacaagaaatgaaatatcaatctcaaatctggaaccaaatatgtggcactgttgatacctctgttctgagatgtgcaattcaattaggtatatttgatgccattcataactctggcaaaccaatgattaccttaaccgaattatcaagcattgtttcatcaccctcttcatcttcaatcgaaccctgcaacttgtatagattagtgagatacttatcccaaatggatctcattagtatcggagaatgtttgaatgaagcaactgtttcattaacaggcacatccaagttactacttagaaaccaagaaaagagtttaattgattgggtattggcaatttmttgcgaaatgatggttgttgtttggcacgaactaagtagctctgtttcaactcctgcggatgagcctccaatcttccagaaggttcatggtaaaaatgctttagaattagcaggggaatttccagaatggaatgatctgatcaacaatgctatgactagtgatactagtgtaactaagccagcgctaatacaaggatgtggcaaaatcctgaacggagttacatcgttaattgatgtcggtggtggtcacggtgccactatggcctacatagttgaagcttttcctcacataaaaggtgcggtaatcgatttaccacatgttgttgaagccgctccggagcgtccaggtgttgagttcatcagcggtgatatattcaagtccatttctaacgctgatgctgtgttgttgaagtatgtcctgcacaattgggaagatacggaatgtgtgaatttactgaagagatgtaaggaagcagttccggcagacaaaggaaaagtgatcataatggatttagtaatagacgacgatgataacagtattttaacgcaggcaaagttgagccttgatctcactgtgatgaaccatggaggaggtagagaaaggactaaagaagattggagaaatctaattgagatgtctggatttagtaggcatgaaataattccaatatctgccatgccatcaattattgttgcttatccttagttaagtcacccgcatgtttacttgaacgggaataagttgggggcgtgttgaatctgttaacatcgcaattgtgcctttactttatgcattctcattccggtagaaactgtttgggggcattcggattctgctgagcccttttatgtatgtttgtttgttggttggttggttttcaagtaactgaagtttcttctctgttttcaaggc

SEQ ID NO: 10 - protein, 356 aa, Papaver somniferum
  misc_feature (122)..(122): Xaa can be any naturally occurring amino acid
MEIHLESQEQEMKYQSQIWNQICGTVDTSVLRCAIQLGIFDAIHNSGKPMITLTELSSIVSSPSSSSIEPCNLYRLVRYLSQMDLISIGECLNEATVSLTGTSKLLLRNQEKSLIDWVLAIXCEMMVVVWHELSSSVSTPADEPPIFQKVHGKNALELAGEFPEWNDLINNAMTSDTSVTKPALIQGCGKILNGVTSLIDVGGGHGATMAYIVEAFPHIKGAVIDLPHVVEAAPERPGVEFISGDIFKSISNADAVLLKYVLHNWEDTECVNLLKRCKEAVPADKGKVIIMDLVIDDDDNSILTQAKLSLDLTVMNHGGGRERTKEDWRNLIEMSGFSRHEIIPISAMPSIIVAYP

SEQ ID NO: 11 - DNA, 1492 bp, Papaver somniferum
aaatcttgtaattaaaaaagatataaatgttagatatcaattacatgatcattatccaataatatacaaaaatactaacttgattggtggtaggttatttaaccatgtatgtgattcattgtagcaattaaatcgaaaaaaagtttaaaactgtctataacttttttgaatgatacgtacgtactttataactgtcgaaacaaagtttcaccttgtcatccatctgttagccgaccatatagaagaaaggttaaataaaatgggctctgtaatgaatcttcttaatagtaagagagggaccctaaattctcttatactataaatatcgactccatttatccaaagttcaaacatcatccaataaaaatccaacaatggcagatccttatgaattcctaatgtgcattcacaatcctgaagaagataccctaacaagaaattttccgattcctgctactcccttagatcaaaacaccaaagacatttctttaaatcctgataggaaaacctcacttcgaatctttcggccaccaaccaaagaacctcctgtaacaaagaataagctgcttcctatcataatttatttccatggtggaggtttcattcttttcaatgcagattcaactatgaaccatgacttttgtcaatcgattgctacacatatacccgcgctggtcgtttctgtagactaccgtcttgctcctgaaaaccgacttcccgctgcctatgatgatgctgttgatgctttaaactgggtcaaagaccaaggtttaggcaaactaaataatagtgaagtatggttaaaagagtatggtgacttctcaaagtgtttcattatggggtgcagctcaggtgctaatgttgcatatcatgccagtttaagagcaatagaaatggatcttgaaccagctaagattaatggattaatattacactgccctttttttggtagtcttgagagaactgaatcagattcaaaagtgatcaacaatcaggacttgccgcttgccgtaagggatgtcatgtgggaactggcgttgccgcttgggtctactcgtgatcacgtttattgtaatccgaatattgatcatgatggatcatcatctggaaatatggtggggttaatcgagagatgttttgtggtaggattttatggggatccacttattgatcgacaaattcagctggtgaagatgctggaggaaaaaggtgtgaaggttgaaacttggattgaacaaggagggtatcatggggtgctatgctttgaccctatgatacgtgaaacctttttggaaaaactaaaacattttattttaaacgacgaatttatatactaaaatatattattagtattaaacaatgaaattcttattttttctaaaatgagcttttggacgaaacattgtgtacgaactagctgatgtaatttttcgttttaccggatttttcattttttttgctttctttctgctctcttttataagtcgttctt

SEQ ID NO: 12 - protein, 320 aa, Papaver somniferum
MADPYEFLMCIHNPEEDTLTRNFPIPATPLDQNTKDISLNPDRKTSLRIFRPPTKEPPVTKNKLLPIIIYFHGGGFILFNADSTMNHDFCQSIATHIPALVVSVDYRLAPENRLPAAYDDAVDALNWVKDQGLGKLNNSEVWLKEYGDFSKCFIMGCSSGANVAYHASLRAIEMDLEPAKINGLILHCPFFGSLERTESDSKVINNQDLPLAVRDVMWELALPLGSTRDHVYCNPNIDHDGSSSGNMVGLIERCFVVGFYGDPLIDRQIQLVKMLEEKGVKVETWIEQGGYHGVLCFDPMIRETFLEKLKHFILNDEFIY

SEQ ID NO: 13 - DNA, 1464 bp, Papaver somniferum
taactaacaggcaaacaataacaggttgcacctacaacattcaatttttattttggtaaatgaagttcagttggagagtaaccacatctttgttgtcggcattgcccccacaatactgagtgttttggctgagtgtagtctgactgtaggtaagctacaactgcatgttgcagataataatcactaactgattattcatgcatacctaacagtcatattgttatagttcccaaaaaaaattctcgaactataaaggcatgcatggacagaaaaatatatcagagagatatcagaaattcaaagagatggaaggaacagggaagatagtatgtgtaacaggtggagctggatacttggcatcttggctgatcatgagattgcttgaacgtggttactctgttcggaccaccgttcggtctgacccaaaatttagggaagatgtgagccaccttaaagctcttcctgaagctacagagaagcttcaaatttttgaagcagatcttgaaaacccagaaagtttcgacgatgcgatcaacggttgtgtcggtgtctttctcgttgctcaaggaatgaattttgccgaagaatatactcttgaaaaaataatcaaaacatgcgtggaaggaactcttagaattctacagtcatgcttgaaatctaaaacagtgaaaaaggttgtgtacacatcttctgctgatgcagcaatgatgataagtaatctcaaagctgttaaagaaattgacgagacaatatggtcagaagttgacaatttcattagcaaaccggaacaagttattcctggattgccctcatatgtggtttcaaaggtactgacagaaagagcttgcctaaagttttctgaagaacatggtttggatgttgttactatacttcctccgttggttgttggaccttttatcactccccatcctcctcccagtgtatctatagctctttcgataatttcaggtgatgtgtcgatgatgcttggtgttagacttgaaaatgcggtacatatagatgatgttgctttagcacacatattcgtttttgaatgtgaaaaagcaaaaggaagacatatttgttcttcagttgattttccaatgcatgatctgcctaaatttatatctgagaattatccggaattcaacgtaccgactgatttactaaaggatattgaggaacaagaaccagttcatctttcctcagataagctgttgagtatgggatttcagttcaaatatgattttgcagagattttcggtgatgcaatacgatgtgccaaagagaagggtttcctttagagaccaactatagtttggttcggaggagatgtgggagtagctagcccaaaatgccctgctcgcactagcttatattattgttattgtttttcaaatgaataaacgggcagtttttttttttatgaacttgattttacaacgaagagcctttggctatatg

SEQ ID NO: 14 - protein, 348 aa, Papaver somniferum
MHGQKNISERYQKFKEMEGTGKIVCVTGGAGYLASWLIMRLLERGYSVRTTVRSDPKFREDVSHLKALPEATEKLQIFEADLENPESFDDAINGCVGVFLVAQGMNFAEEYTLEKIIKTCVEGTLRILQSCLKSKTVKKVVYTSSADAAMMISNLKAVKEIDETIWSEVDNFISKPEQVIPGLPSYVVSKVLTERACLKFSEEHGLDVVTILPPLVVGPFITPHPPPSVSIALSIISGDVSMMLGVRLENAVHIDDVALAHIFVFECEKAKGRHICSSVDFPMHDLPKFISENYPEFNVPTDLLKDIEEQEPVHLSSDKLLSMGFQFKYDFAEIFGDAIRCAKEKGFL

SEQ ID NO: 15 - DNA, 1388 bp, Papaver somniferum
attatccaaacaaagtttcacattgtcatccatctgttagccgataatatacaagtatacaagaaaagcaaaataaaatgagctcccgaataaatcttcttaatagtgagagtgggacgctaaatttccttaatactataaatatccactccatttatccaaagttcaaacctcacccaataaatatccaacaatggcagatccttatgaattcctaatgtgcattcacgatcctgaagaagataccctaacaagaaattttccaattcctgctactcccttagatcaaaacaccaaagacatttctttaaatcttgataggaaaacctcacttcgaatctttcgacccccaaccgaagaattttgtgtaacaacaaataagttgcttcctatcataatttacttccatggtggaggtttcgttcttttcaatgcagattcaactataaaccacgatttttgtcaatcgattgctacacatttacccgcgctggtcgtttctgtagactaccgtcttgctcctgaaaaccgacttcccgctgcctatgatgatgctgttgatgctttaaactgggtcaaagaccaaggtttaggcaaactaaataatagtgaagtatggttaaaagagtatggtgacttctcaaaatgtttcattatggggtgcagctcgggtggtaatattgcatatcatgccagtttgagagcaatagaaatggatcttgaaccagttataattaatggattaatattacacagccctttttttggtagtcttcagagaactgaatcagatttaaaagtgatcaacgatcaagacttgccgcttgcggtaagggatgtcatgtgggaactggctttgccgcttgggtctagtcgtgaccacgtttattgtaatccaaatattgccaacgatggatcatcatccggaaatatggctgggttaatcaaaagatgtttggtgataggattttatggggatccacttattgatcgacaaattcagctcgtgaagatgttggaggaaaagggtgtgaaggttgaaacttggattgaacaagaaggctatcatggagtaccatgctttgaccctaagatacgtgaaacgttgttgggaaaaataaaatattttatttgattcagtttatcttatattattactaataaacaacgaattatacgaaagctttcggaaaacgttttcagatgtggctaataaacaacgttgtacgtgaaaatgtggctaataaacaacgaattactaataaacaacgttgcacgtgagcttgttgatgtaatttctcgcttcacctttcttttttccaattttttttcgcgtttatttctttttaaaactgttgttgctttgtgtcttatttcctgtttttgat

SEQ ID NO: 16 - protein, 313 aa, Papaver somniferum
MADPYEFLMCIHDPEEDTLTRNFPIPATPLDQNTKDISLNLDRKTSLRIFRPPTEEFCVTTNKLLPIIIYFHGGGFVLFNADSTINHDFCQSIATHLPALVVSVDYRLAPENRLPAAYDDAVDALNWVKDQGLGKLNNSEVWLKEYGDFSKCFIMGCSSGGNIAYHASLRAIEMDLEPVIINGLILHSPFFGSLQRTESDLKVINDQDLPLAVRDVMWELALPLGSSRDHVYCNPNIANDGSSSGNMAGLIKRCLVIGFYGDPLIDRQIQLVKMLEEKGVKVETWIEQEGYHGVPCFDPKIRETLLGKIKYFI

SEQ ID NO: 17 - DNA, 680 bp, Papaver somniferum
aaagtaattttaagtgtttttagttttgttacaagtttggtgaatgatctttgatatattttttttttgaagtagtgaatgaagtaatgttctacttcccataggatttgctctaacgattaactatgtttgtcccaaagggttgtatgacttacatacacaatattaaaagattcgaggataaggatatgtttattaaccaactcctcaaaacatttagacctggatcaatcatttcgattcttctcagacaattacgacatgtatgaatcgatggatacatttgaaacacatatccttacccgtgcagttacgacatgggttgagacctagtgattacatataaaacaactaattataccaatgacttgagttggaaactagtcccatgatcaattttttatcaatcaaaagaaatttatacgaaaggaaactatatgattgccatgactcgtaaatatacacaagcaagatggaggtcctattaactccaatcaaaccacaatagataaatatatcgtgaatcatgtgtggccaatatatacccacacttctatatataagtgcatccacctctctttgttttccaaaacaaaacataaacacaatttattcagagatatctggatggatactgcagaagaaaggttgaaagggcaagctgaaatatgggagcatat

SEQ ID NO: 18 - protein, 355 aa, Papaver somniferum
MDTAEERLKGQAEIWEHMFAFVDSMALKCAVELGIPDIINSHGRPVTISEIVDSLKTNTPSSSPNIDYLTRIMRLLVHKRLFTSELHQESNQLLYNLTRSSKWLLKDSKFNLSPLVLWETNPILLKPWQYLGKCAQEKSSPFERAHGCEIWDLALADPKFNNFLNGAMQCSTTTIINEMLLEYKDGFSGIAGSLVDVGGGTGSIIAEIVKAHPHIQGINFDLPHVVATAAEFPGVKHVGGDMFVDIPEADAVIMKWILHDWSDEDCTIILKNCYRAIRKKKNGKVIIVDCVLRPDGNDLFDKMGLIFDVLMMAHTTAGKERTEAEWKILLNNAGFPRYNVIRTPAFPCIIEAFPE

SEQ ID NO: 19 - DNA, 1371 bp, Papaver somniferum
atggcaacaatgtctagtgctgctgttgagatgatctccaaggaaatcattaagcccacaactccaaccccatatcaacttagaaacttcaacatctcacttttcgatcaatatatgcctccgaattatactacggtcattctattttaccctgcttccatcgctgcagatagtaccggtagtgagctccatgatgatcttggcttgctcaagaggtctctttctgagacactagttcacttttacccaatggccggtaggttgaaagataacatggttgtcgagtgcaacgaccaaggggttgacttttacgaagtgaaaatcaaagctaaaatgtgccacttcatggtgaaaccagatgaatttcccttaaatctgcttcttccatacgaagtcgtttccaagaattttgtcaaggaagcacaggtgattgttcaggtgaatatgttcgattgtggtggaactgccatttctttgtgtgtatcgcacaagattgcagatgcatgcaccatgagtacattcattcgtaattgggcaggaaacacctactcagctcgttgcggtggtgcaccaacaacaaatcagaattcttttccttccttcgattcggcatctctcttcccacctagcgaacaacttgtatttccatcagaagtgccacccaccctcgtttcccatcctaccgacgatagcagaagagaaaaaagtgtcagcaaaagatttgtgttcgacgcggtaaagataaactctgtgcgcgaaaagttaccagtactgatgcatgataactacaaaagcagcagtaggccaacaagggttgatgtagttaccgctttggtgtggaaggcggccatgaaatccgctcctagcgatgatgttttaccaacggtaaatcatgtggtgagctttagaaagaaaatcgacccgccattacccgatgtgtcatttgggaatctctgcgcggtagttgcgacggcggtatctccaggagcaactgtgacaagtaggaatgatggggttgaggtgcaagaggtactcgaggatcagttagccgaattagtagctcagctgaggggagaaaaatacaaggttaagggtgataaaggttgcattgagaaaatctttctaagttttgttggtggtgacaacgctttgtggatggctagctggtccaagtttggattttatgatgctgattttggctggggaaggccagtttgggtaactactgatctatcaattgttgagccgaaccagaacctaatttgcatgatggatacaaagtgtggtgaagggatagaagtgtcggcaaaatttcttgagaatgacatggccaagttcgaacttcacctaagcaagatcctggaattgttt

SEQ ID NO: 20 - protein, 457 aa, Papaver somniferum
MATMSSAAVEMISKEIIKPTTPTPYQLRNFNISLFDQYMPPNYTTVILFYPASIAADSTGSELHDDLGLLKRSLSETLVHFYPMAGRLKDNMVVECNDQGVDFYEVKIKAKMCHFMVKPDEFPLNLLLPYEVVSKNFVKEAQVIVQVNMFDCGGTAISLCVSHKIADACTMSTFIRNWAGNTYSARCGGAPTTNQNSFPSFDSASLFPPSEQLVFPSEVPPTLVSHPTDDSRREKSVSKRFVFDAVKINSVREKLPVLMHDNYKSSSRPTRVDVVTALVWKAAMKSAPSDDVLPTVNHVVSFRKKIDPPLPDVSFGNLCAVVATAVSPGATVTSRNDGVEVQEVLEDQLAELVAQLRGEKYKVKGDKGCIEKIFLSFVGGDNALWMASWSKFGFYDADFGWGRPVWVTTDLSIVEPNQNLICMMDTKCGEGIEVSAKFLENDMAKFELHLSKILELF

SEQ ID NO: 21 - DNA, 1599 bp, Argemone mexicana
atggataattttcttctccagttccaaccaatttcaattgcagctttttttgttgccctagtttttctgtattggagttatggaagaaaaagcaacaaaaccctaaaaccaagagcaccagaagcagcaggaggaagaccaataacaggtcatcttcatcttttttatggagaagaattaactcatcgaaaactaggttccatggctgataaatatggaccagttttcaatattagatttggttcacataaaaccctagttgtaagtaattgggaaatcgttaaagaatgtttcactacaaatgatcgattattctcaaatcgaccaggtactttagctattaaactaatgttttatgatactgattcagtaggttatgcaccttatggaaattactggagagaattaagaaaaatttcaactttaaaacttctctctaatcatagaatagaaaccctaaaacatttaagaacttctgaagttgaatcctgttttaaacagctttataatcaatgggaaatgaaaaatgaaaacagggtagaagttgataaattagggtttgcttcagtaaggatggataattggtttggggatttaactttcaatgttgtagcaagaattgttgctggaaaaaagaattttgcaggaggtgcagtaaatggtgatattggagctcagagatataaagtagccatggatgaatcttttagattaatgctaacatttgcatattcagatgtgattccatcactgaaatggttagacaaattaagaggtttaattagagatatgaagcgttgtggatctgaaattgattcaattgttgctagttgggtagaagaacatcgtttaaagagaaattcttctgaaaataataatttagatcttgaagaagattttattgatgtttgtttggatattatagagagttcttcattacctggtgatgatccggatactgtcatcaaatctacttgtctggatatgatattgggtgggagtgataccacgacagtaaccctaacatgggccatctccttaatattgaacaatcctcacgtgttgaaaagggcaaaagaggaattaaattccgtagttggaaaagatcgacgtgtagaagattcagacatccctcatcttacatacatccatgcaatcatcaaagaaaccatgagactctaccctgctggaccactgatcgaaaggaggacaatggaagattgtgaagtaggtgggtaccacgttccagctggcacacgtttattggttaatgtatggaagatgcaaagagacggggatgtgtataaagacgatccattggtgtttagacccgagagattcatgactagtaatgctgatgtggatctaaagggtcagcattttgaactgataccattcggtgcgggtcgcaggatatgcccgggtgtgtcatttgcggttcagttgatgcatttggtattggctcgtcttctacatgagtttgaaattactacaataccttctgaaccaaaggtagatatgtctgaaagtggaggattaatctgtcataagataaagccactagaagtgctaatcaaaccccgactcgagctgaactaa

SEQ ID NO: 22 - DNA, 1614 bp, Argemone mexicana
atggatttctcatcaatactactacttctcaatattaattgcttcacaacttccttggtcacccttcttgttcttgtcatggtttttctctacaataatacaagatttactaaacccaaaggtaataaaaagatgattaaaccacccagactacccggtgcacgccctcttttaggtcacctccatctgtttggaccaggtgagcttcctcacaaggttctctcaaccatggcagataaatacggtcctgcctttacaattaagttcggtaaacacacaacattagttgtgagcgatatccataccataaaagaatgtttaactactaatgacatcctcttttctaaccgtccttcttctatagcctttgatctcatgacttacgctgatgactccgtagctttcgcacattatagtccttattggcgtgagcttagaaagatatctactctcaaacttctatctaataaccgtcttcaatctatcaaacaacttcgactctctgaggtgaacgtatgttttaaagaactatatagtttatgcaacaataataataaaagtggagctccggttttgattgatatgaagaaatggttcaaagaggtcacgactaatatagtcattagagttattgttggtaaacaaaattttgggtctaagattgtgcgaggcgaagatcaagaagctgccaattacaagaaaatcatggatgaactttcacgccttgctaaattgtctatgttctctgattatgctcctttacttagtttgtttgattacttccgaggaaacgtgagtgctatgaaaagaaatggtaaagaattaaacgcgatgcttcagaattggttggaagagcataagaggaagaagaactcatcaatatcgaacgatgatgaacaagatttcatggatcttatgttgtcaattattgacgaaactaagctatacggacgtgacgctgatactttcattaaagctatttccctttctatgatcgtgggtggaatagacaccgttgtcgtgactctaacatggattctcgccttaattatgaagaatccttttgctttgaaaaaggctcaagaagagttagactttttcgtcggaaaggaaagacaagtagaagattcagatctcaagaacttggtatacatgaatgccatcgttaaagaaacgctgcgattatacccattaagttgtattcttgaacgtgatacgaaggaagactgtgaagttggtggctactacgtcgaaggtggcacacgtttactaataaacgcatggaagttacaacgggacccgaatgtatggacagacccttcggaatttaagccggagagatttctaaatgagaatgcagacatagatgttggtggccaacattacgaattaataccatttggagctggtagaagagtgtgtcctggtgtatcttttgcactccagtttatggatttggttctggctcgtctcatccatgggtatgaattgggaactctaaatggtgaagatgttgacctaactgaaaaaactgaaggacaaattaatttcaaagcaacccctctggatctcatcgttactcctcgtctccaccccaatctttatgattattag

SEQ ID NO: 23 - DNA, 1569 bp, Berberis thunbergii
atggaatcaattgagtttctagtaactctgctactcagcctgcttgccctattttgtgcttatgcatggaagaggaaaaaccatacaaaggatagcaaaatcaaagagccaccccaaccagccggagcatggccgataatcggccaccttcatctaatatcccgcggcggccttcctcatataaacatgggggccatggcggacaagtacggtccagttttcatgatccggctaggagtaaatcgagctgtgattgtgagtaacacggagatcgtcaaagagtgcttcacaaccaacgataaattcctactaaaccgtccagttgggttagccttaaacctcatgtgctacaacaacgccatgttcgggttctgtcggtacggtccatattggcgagagatacacaaaatagtcatgcttgagctcctctcgaacagccggctcgagtccctgaagcacgtatgggactcggaaatatcgacatccatcgaagagttgtaccaattatgtcaaacacaaaacaagacccatgaaggcccagttttggttgaaatgaaggattggtttgcagatatggcactcaatgtgtcccttagaatgattgctgggaaaagatactttggtgcaagtgccggtggtaataaagatgaggcaagaaagtgtcaaaagaccataagagatttctttagacttgttggcttgtttatagtgtctgatgcacttccatttcttaggtggctagacttgggagggcatcagaaggagatgaagagaacatttgaagatcttgactatatgcttcaaggatggttggatgagcataaattgaatagaaaatctggtgtgaatggtgatcaagatttcatggatgtgatgttatctattcttgatgattcaaaatttccggattacgacgttgacaccgtcaacaaggctacgtgcttccaattgatcataggaggaactgatactacaacggtcactctaacatgggccctttccttgatgttaaaccacccacatgtattgaaaaaggcccaagatgagttggacatccaagtaggcaaacacagacaagtggaggaatcagacatcaagaacctaaaataccttgaagctgtgatcaaagaaaccttacggatgcgcccagtaggcccactgttaggcccacgagagacgatcgaggactgcaccattggtggatatcgagttcgagcaggcacacgtgtaatggtcaatgcttggaaggtgcatcgtgacccatcggtttggtcaaaccctgatgacttcaaaccggagaggtttctcaagaaggatattgacttcagggaccaaaactttgaattcatccctttcgggtccggtagaagggcctgccctggaatatcatttgccgtggaagtactgcccatggctttggcccgtttactacatgggtttgagcttaagactcaattgggttgcaaggtggatatgacagagcatgccggtttagttcatgctaaagctacccctttggaagttcttgtcagcccacgcctgtctcgagagttgtatgtatcgtcttag

SEQ ID NO: 24 - DNA, 1543 bp, Berberis thunbergii
gggatcacttgctctcattgccattattattctttccaacattgtcaaaaaatcttcgaaatctctttccagtaaaggtggcaagagtgcacccgtggttcatggtgcgtggccagtcatcggtcacctgcacctactgatgggtaaggagttgcctcatcatgcattagccaaactggctgataagtacgggccagccttcacactcaacattggcgcgtatcaagaactagtgatcagtactcgggatcttgcaaaagaatgtttcaccaccaaagacaagttcttcctaaatcgtccaagcaataaggccatgaagatcctgacatatggtgaagcatcagttgggttcgcaccatatagcccactttgggtcgaaatgcgcaaggttacgaaatctaatctcttatctcaccaaagggtcttgatgcaaaatcgttcacgagcatcagaaattgatgcaagttttaaacaactatatgaacaatgcaatgggaagagtggagcttcggtggaaatgaaaaactggtttgaagaagtgatgttgaatgtggttactaggaatgtttctgggaaaagaagttttggtaccaaggcaagacttggtgatgcagaggccgtgaagtataaaagggttattgatgagaccgcacggtttatggggaaccttgtgatctcagatatggttccaagtctttggtggttggataacatgttgggtgctgagagtgctatgaagaaacttgccatagaattggattctctacttggtggttgggtggaggaacatagagggaagaagttgagtgacgacgaggagggggactttatcagtcttacatgggagatgatcgatcagattcagcttcatggtcttgcccctgagacgttcatcaagtctatgtgtgtcggcgtgctgttgggtgggagtgataccacatcagtagccctaacatgggcactctcgctaatgttgaacaatcgcgaggtgttgaagaaggcccaagaagaattggacttccacgtaggaaaggaccgcaaagtggacgactcggacctcaagaatcttgtttacttacaagccattatgaaggaaacaatgaggatataccaagtaggtcctctaattgaacgagaggccgttgaggactgtgaagtgggtggattccaaatcaagaaggggaaccgtatactagtgaacctgtggaagttgcaacgtgaccctgaagtgtggtcagatccgtccgaatttcgacctgaaagatttcttgaggataagtctaaggtggacttgaagggccaaaatgctgaactaatgccgtttggcagtggtcgacgtatgtgtccaggagtttggtttggggtgcactccacttctttggtacttgctcgtctcatccaagggtttgaaatagagacaccactggatgcaaaagttgacatgacggagacatcaagtgtgaccaattataagggaagtcctcttgaagttattgctcgactccccggctcgaacctaagctttatgatttgtagttatgta

SEQ ID NO: 25 - DNA, 1638 bp, Chordyalis celanthifolia
atgactccctcaatttcacaaccttttgagcttcttcttcttctgatgacaatggagtctcttcttctccaatggcaaccaacttccattgctgttcttcttctcgccatcacaattttcctctacaccttcacaaaatcaccccctaaaacccacaaaaaactagccccagacgcaacaggaggacggccattaatgggtcatcttcatctcttcaattcaaacgaattaacacatcgaactctaggatccatggctgataaatatggtccagctttcaacattcgattcggttcacacaaaaccctagttgtatctacttgggaaatcgtcaaagaatgtttcaccaccaacgatcgatcattctcaaatcgcccaggaactctatacatcaaactcatgttctataacgaagattcagtagggtatgcaccttatggagcttactggagagatcttcgtaagctatcaacactgaaactactctcaaaccatcgattggaatcattgaaacatttgagggtttctgaaatgaatgaatgtttcaaacagctttatgagatttgtaacaaaggaagtaaatctgttgctgttagaatggataattggtttggtgatttgacttttaatgttgttgcaaggattgttgcagggaaaaggaattttgcttcaattagtaatgatgttggagctatgagatataagaatgcaatggatgaagcttttagattgatgactgttttttcattttctgatgtgattccatcacttggttggttggataatttgagaggattagtgggtgatatgaaaaaagctgggaaagaaattgattcagtggtttcaggttggattgaagaacatcgtgagaagagaaagagaagatcatctggtggtaataacagagatggagaattagaagaggaggatttcattgatattactttgtctatcttggaaacttcaagtctccctggtgatgatcctgacatgactatcaaatctacttgcttggatatgatcttgggtggtagcgacactacaacggtgactatgacttgggctctctccttgctattaaacaatgctcacgctttgaaaagagcaagagaagaactggacttgcacgtcgggagagatagacaagtggaagattcagatatcaacaatttggtctacatccaagcaatcatcaaagaaacaatgagactatacccagctggacccctcattgaacggatgacaaaggaagattgtgaggtaggtggattccacatcccagccggaacacgtttgttagttaatctctggaagatgcaacgagacccaaatgtgtgggaggatcctttggaatttcgacctgaaagattccttaccaacaatgcagaaatagatctaaagggtcagcatttcgaactcatcccatttgggacgggtagaaggatatgcccaggtgtttcatttgccttacaattgatgcatttggctctcgctcgtttacttcacagttttgaagttgcatcccccatggatgccaagattgatatgactgaaaccgcaggccttataagccacaaggtaattccgctagaagtcctcatgactccacgccttgactctaagctttatgattattag

SEQ ID NO: 26 - DNA, 1572 bp, Chordyalis celanthifolia
acacacacaaccgaaaagaatttaccaccggaagtgcctggtgcattgcctgtcatcggtcacctccacaagttaggtggtcggaaaggtcttctaccatatcatgttcttggagccatggctgataagtacggacctgccttcacattccagtttggttctaaccgaacccttgtgattagtaattgggaaatggtaaaagaatgtttcacgtctaccaacgataagttattcgcttatcgtccaacagcattgttcaataaggaagtattctgtagtgaccattcttttggattcggaccttatggcccgttctggagggagatgcgtaaggtttgttcgcttcatcttctctccaattatcgcctcgagctcttaaaacactctcgaaaatccgagatggatgagtgtttcaaggagttgtaccaactatggagtgcttcaaatattagcaaagacaagcaacctgctgttttggtggtggaaatgaagaaatggttcgaagatgcgatgttcaatgttgcttcgagagttgtggtgggaaaaggaagtttgaaatctcatgagaaggctggagggagtgataatgaagtagcgaggaacaaatataagaaaggcatggatgaggctagacgacatatgggaacatttgttatatcggataggatcccgtttctttggtggattgattatttacggggtatccatagttctatgaagcgaacggcgaaagaccttcatgccattgtagagacgtggttagaggaacaccgtcttcattgtcacaaacggagagtattgcaactcgatgccaaccatgaggttgaagatatggcgaaagaggaagaaaaagattttatggatgttttattgacgatggcggacgagggagccatcaaaatctttgaccatgatcttgataccgttatcaaagctaattgtctggatatggttatcgctggaaccgatacaccaaccgtaatgcttacatggaccctttcactattactaaacaatccagatgttttgaaaagagttcgagatgaactggatttacatgttggaaaagaaagacaagtagaagaatctgatgtcaagaatttggtctatctccaagcagttttcaaagaaaccctgcgtttatacccagctgtacctctaaatgaacgtttgacaatggaggattgcaatgttgggggttacgatatcccagccggtacccgtctattaatcaacatttggaaggttcaaagagacccaaatgtgtggcaggatccctcagaattccgtcctgaaagattcttgagtaaggaaaaatccaccatagatgtgaggggtctagattttgaactcattccattcgggacaggtagacggatgtgcccagggatttcattttccctccagctcatgcatttgggactcgctcgcctcattcacggctttgaattagcaactccgatggatttggatgtcgacatgtctgcaaatcctggagctttcaactataaatcaaccgatcttcaagttcttgttagcccacggtttcattctaagttctacggttgttaa

SEQ ID NO: 27 - DNA, 1611 bp, Chordyalis celanthifolia
atggatttccttgctcttcaatggttcccagcttccttgactgcccttcttgccttggctgtcctttacaacttctggaccaagcaaaggacttacaagaatggaaagacgagtactaaacaggcacctgtagctgccggtgcatggccagttcttggtcaccttcacttgtttggtggaggtgaactgcctcacaagatgcttgctactatggctgataaatatggacctgccttcacaatgaagtttggtacacatcaaacactagtagtcagtaacaccaagattgtaaaagaatgtttcacaaccaatgatactttgtttgcaaaccgtccatccaccacagcctttcacctcatgacctacgataacgagtcggtagccttcacaccatatggtccattctggcgtgagctgagaaaaatctcaacactcaagcttctttctaaccaccgtctccaagcaattaaggatgtacgtgcctcggaagtgaatgtgtgcttcagggagttgtacagtcaatggaggataaataaaagcgagcctgaaaccagtgatcatcagggtccaattctggttgatatgaagaagtggttcgaagaagtctcagacaatgtggtgcttagagtgattgcagggaaacaaaactttggctctaagattgtgcatggagacaaagaggcccttcactacaagaaaatcatggacgagatactacgtcttgcggcagtttccatgctttcagatgtggctcctttgcttggttggttagatatgttccaagggcatttaagtgccatgaaacgaaatgcgaaagaggtagatactatgctatgtaactggttggaggagcatcgaacgaaaagactctccagcgatcatgacggtgtagagcaggatttcatagatgtcatgctgtcaatcgtggaggagaacaagttctctggccacgacaatgataccgtaatcaaagctactgtcttggccatgatcatgggtgggactgataccaccgctgtcagcttaacttggattgtgtccttgttgatgaacaaccgccacgttttgagaagggcacaagatgaacttgacttgcacgtggggaaggatagacaagttgatgattcagatctcaagaacttggtttatctcaatgctatagtcaaggaaaccatgcgtttgtacccattaggtgctcttcttgaacgtgaaaccaaggaggattgtgaggttggtggtttccatgtcaaaggtggaacacgcctattagtgaatgtatggaagctacaacgagacccaagcttttggaccgatccaacagaatttaaacctgaaagatttttagcagacaaggcgaacatagatgtcggtggtcagcattttgaactactgccatttggggctggtagaagagtgtgcccaggagtctcgttcgcactgcaattcatgcatttggtacttgctcgtctacttcacggatttgatttggctacccctatgaatgcagatgtcgatctaaccgagagtactgaaggacatgtcaaccagaaagcatcccctctcaatctacttgtcactccacgtctccattctaagctttatgaatactag

SEQ ID NO: 28 - DNA, 1632 bp, Chordyalis celanthifolia
atggagtacacattctcatcagcctcattgttctcctcctcctcccttcaacaatggctctcaacccttctacttctaatttcctccatcaccatttctctttaccttactcgtcgcggtaagtcatcaccgccaatggtccctggagcatggccactcattggtcacctacatttacttggtgggaacgatccacttcatatcgttcttggaaccatggctgataagtatggacatacctttgccatgttattcggtaaacatccatcacttgttgttagtagtagtgacattgtaaaggaatgtttcacttctacaaacgataaattgttttcgcatcgtcatgttcctaccggagttaaatacatgttctacaataatgactcgtttggttttgcaccttacgggccttattggcgtgaaatgcgtaaaatgaattcactttctcttttctcacaccatcgcgttgaaatgcttaaccgaattcgaacatctcaaattaacatttggtttaaaaacctatatgaaatgtgtaccaaggagaagagtactagtacaagtagtgatggagttgtggttgaaatgaagtcatggtttgatgaaatgtttttcaatgtacttgtgaatatgattgttaaacctattaatgatgatgaagagttggtgaagaaatacagagaagtggcgaccgaggcaggacgcctattgtcaagcatggctgtttcggatatggttccatctctaggatggttggatcatttgtttgggattgtgggtaaaatgaagaaaactgcaaaagatatggatgctatcctcactacttggttagaacagcataagatcaaatctcaacagctgaggagaagtaatggaggagaaggtgctgctgatcaaacagaggaggaggagaaggagggaaaagggctcattggtgatttgttgtctatgcaagagtctgctcttttcggccatgaccgagacactgtcatcaaatctgcttgccaggcgttgatcatggctgggagtgacagtacatcagccacattaacatgggttctctctttgttactgaaccatcgtgacgcactcagaaaggctcgagaagaactggatcaagttgtaggaaaggacagacaagtagatgattcagacattaaggatcttgtatatctccaagccattttaaaggaaacgatgcggttatatccagctgcaccgatattagagcgcttggcagtagaggactgcattgtaggtggatttcatgttcaagcaggcacaacactgtttgtgaatgtcagcaagctgcaacgtgacccaaatttatggacggatcctttagaatttaaacccgagagatttctcaccggctgtaacgcggatgtggacttgaagggtcaagattacgagctcgtgccttttggttcgggtagacggtcatgtcccgcggtatcgtttgcagttcgtgtaatgcttttggtacttgcacgcttcattcactcatttgaagtgaagactcgtgaagaagatgggattttggatatgactgagagttcaggtcacaccaattgcaggtctagcccactggaagtcctcatctcaccacggttggattcgaagatctactgttga

SEQ ID NO: 29 - DNA, 1587 bp, Chordyalis celanthifolia
atggagtactactcatcactaccatttcttcaacaatggccactttcatctatatcatcatcaccaacttctattgctacaacacttctcattgtagcttgtttcaccattgttttcctctacataaacaccagttctaagtccaataacaacctgaaatcaccaccgaaacttcccggtgcatggccattcatgggtcacctacatttactaggtggaaaccaaccagctcatgtcagtcttgcaaacatagcagagaagtacaaatcgactcccttcatgatccgaatgggtcaacattcaaccctcgttgttagttcggttgatctcgtaaaggaatgtttcaacaatacaaatgataagctgttttcgaatcgtagtatcgcaagaggaattagagatatgttttacgatatggaatcgtttgggtttgcaccttatggttattactggcgtgaactacgaaaagtatctgcccttactctgttctctactcatcgtgttgattcggttatccaaattaaaacacctcaaatcgacggttggtttaagaaactttacgagcaatgtacgaatacgaaaggcggaattgttgaaataaaatcatggttggatgaaatgatgtttgatgttcttgtgaagatgcttgttgaacctaaggatgaaggatctgtggagaaatacagacatgtagcaggggaggctttggaagtgctggggaatatgagcatctatgatttagtacctagtcttggttggttggatcacttcactgggcttgtgaagaaatataaggtaactggtaagaaaatggacactatcctcaacagttggttagaagaccatcgaggtgagaaagtagctgaggaacacaagggtttaattggtaagttgttgtcaatgaaggaaggatcaaagcttcttggccatgatggagatactgccatcaaatctactgttcaggtgttgatcctaggtgccggcgatagtgcaggagcaactttaacatgggcaatctcattattattgaaccatcctcacataatggagaagcttcggaaagaactggatgcagccgtaggaaaggatagacaaatcgaagactcggatgtgaaaaaattcacttatctactagccatattaaaagaaacaatgcgattatacccggtgacaacgcttctacaacgggaaacgatggaagattgtgctataggtggatatcatgttgctgctggcacaagactgatggtaaatgtttggcaggtgcaacgtgacccgaatgcgtggtcagatcctttggagtttaagcctgagagattcctaactgagtgcgcgcatgtggatttctcgggtcagtattctgagcttattccattcggaacaggtcgacggatatgcccagctcttacgctatcggttcggctcatgttattgacccttgcccgtattatccattcgtttgatgtgaaaattcctaatggggcatcgagtgtggatatggcaacaagcgtaggttttgttaatctgaggttgaccccacttgaagtcgaactctcaccacgcttggattcaaagatctacggttga

SEQ ID NO: 30 - DNA, 1614 bp, Chordyalis celanthifolia
atggattcctctcttcttcaatggtacacaacagcttcaatggctgcccttcttgccttagctttcttctacaaactctggagtaagccaaggacttctaaaaatggaaaaagtactttgcaggcaccagtagcagctggtgcatggccagttcttggtcaccttcatctgtttagtggaggtgagttaccacacaaaatgttggctgccatggccgacaagtacggccctgccttcacaatgaagttcggtacacaccgaacccttgtggttagtgacacaaagattgtaaaggaatgtttcactaccaatgatacgttatttgctaaccgtccatccaccatggcctttcatctcatgacctatgacaatgagtcggtagccttcacaccatatggtcaattttggcgtgagttgagaaagatctccacactcaaacttctttctaaccatcgccttcaggcaatcaaagatgtacgtgcctcagaggtgaatttttgctttaggacgttgtacaaccaatggaggataaataaaagtgagactatcggaaccggtgatcatcaaggaccaattttggtggatatgaagaagtggttcgaagaagtgtcaaacaatgtggtgatcagagtaattgtaggcaaacataactttggatctaagatcgcccgcggaaagggagaagcccttcactacaagaaagtcatggacgaggtcctacgtctagcggcagtgtccatgctctcggatgtggcccctttacttggttggttcgatcatttgcaagggcatgtaagtgcaatgaaacgaaatgcaaaagaagtagacactttgctctgtagttggatggaggaacatcgaaaaaagagaacctccaacggcagtaatggtgtagagcaagatttcattgatgtcatgctgtccatcgtggaggagaacaagttctctgggcatgacagtgacactgtcatcaaagctaccgtcttggccatgatcatgggtgggactgatacatcagccgtgagcttaacttggattgtctccctgttgatgaacaatcgccacgttttgagacgggcacaagaagaacttgacacacatgtgggaaaggatagacaagttgatgattcagatctcaagaacttggtttatctcaatgctatcgtcaaggaaacaatgcgtttgtacccactaggcgcccttcttgaacgggaaactaaggaggactgtgaggttggcgggttccatgttaaggctggcacacgtctattggtgaatgtatggaagctacaacgagacccaaacttttggattgatccaacagaatttaaaccagagagatttttaactgacaacgcaaacatagatgttgggggtcagcattttgaactgctaccatttggtgccggtagaagagtgtgccccggagtctcattcgcattgcagttcatgcatttggttcttgctcggctaattcatgggttcgaattggatacccctatgaatgcaaatgtcgatatgaccgaaagtacagaagggcatgtcaaccataaagcatccgctctcgatctccttatcacaccacgcctccggtctacactttatgattattaa

SEQ ID NO: 31 - DNA, 1716 bp, Chordyalis celanthifolia
atgttcaagtctgttccaagtgcacaggcaattttacwyaarctttcattcatccaccagtacttcctgctctctcaaacaaatatggattcccttctttttcaatggtttccagcttcaatggctgcccttgttgcctttgcttttctttataagctttggagtgcacccaaaattaccaaaaatggaaagacaagtactaaacaggcacccatagcagccggtgcatggcctgttcttggtcacctccatcttttcggtggaggtgaattgcctcacaaaatgcttgcaggcatggctgaaaaatatggtcctgccttcacaatgaaatttggtatgcatcgcacactcgtggtcagtgataccaagatcgtaaaggaatgtttcactacccacgatactctctttgctaaccgtccatctaccacagcttttcaccttatgacctacgatcaagagtcggtggccttcaccccttatggtcctttctggcgtgaactacgaaagatctccacgctcaaattactttctaaccaccggttacaagcaatcaaggacgttcgaacctctgaagtaaacgtttgctttagagggttatacaacatatggcaaaccaacaaaaatgagcaaggtggtactgttagtgatcatccacgccccgttttgattgatatgaagaaatggttcgaagaagtttcgaataatgtggtgattagggtgattgccggtaaacaaaactttgggtctaaaattgtacgtggtgaagaggaggcagtaaaatacaagaaaatcatggatgaagtcctacgccttgcggcagtatctatgctttctgatgtagctcctttacttggttggttagatcttttccaagggaacttgagtgcaatgaaaagaaacgcaaaagaagtagataatatgcttaatgcttgggtggaggagcatcgaagaaagaggctcgcacatagtgctaaagttgaggctactcatgtagaacaagactttgttgatgttatgttgtccatcatggaggagaacaagctttcatcagtccacgacgatgacactgtcatcaaagccactgtgttggccatgatcatgggtgggactgataccacagctgtgagcctgacctggacagtttccttgttaatgaaccatcgttatgtgttgaagaaggctcaagaagaaatcgatcaacatgtgggaaaagaaagacaagttgaagattcagatcttaagaacttggtttatcttaatgccattgtcaaagaaactatgcgtatgtacccgttgggtgctcttcttgaacgtgaaaccaaggaggattgtgaagttggtgggttccatgtcaaaggtggaacacgtctattggtgaatgtttggaagttacaacgggatccaaatgtttggattgatccaacagaatttaagccagagagatttttggcagagaatgccaacatagatgttgggggtcagcattttgaactgctaccatttggtgctggcagaagggtgtgccctggagtttcattcgcactccaattcatgcatttggttcttgctcgcttaattcatggatttgaattggaaaccccaatgaatgccgatgtcgatctaactgaaagtaccgaaggccatgtcaaccacaaagctagccctctcgatctgctcatcgccccacgactcaactcgaagctttatgaattgtag

SEQ ID NO: 32 - DNA, 1602 bp, Chordyalis celanthifolia
atggattccttgtttgttcttcttcaatggttctcagcttcattggctgcagttcttgctttggcttttctttataacctatgggttaagccaagaattagtgatggtaaaggaaataaagggagtactaaacaagcacctgttgcagccggtgcgtggcctgttctcggtcaccttcatctctttggtgggagtgaattacctcacaaaatgcttgcagccatggctgataagtatggacctgccttcacaatgaagttcggtacacatcgaacacttgtggtcagtaacacccaaatcgttaaggaatgttttactaccaacgatacacacttttccaaccgtccgtccaccacagcttttcacctcatgacttatgacaacgattcggtagctttcacaccttatggtccattttggcgtgagttgcgtaagatctctaccctcaagcttttatctaaccaccgtcttcaggcaattaaggatgtacgtgtttccgaggtgaatgtttgcttcaaggatctatacaatcaatggaagacgaatcaaaaccaacgtccggtcttggtggacatgaagaaatggtttgaagaagtatcaaacaatgtggtgattagagtaattgtggggaaacaaaactttgggtctaagattgtgcgcggtgaggaggaggctgtcaaatacaagaaaatcatggatgaaatcctacgccttgcggcagtgcctatgctttcggatatggcccctttacttggttggttggatcttttccaagctcacaagagtgcaatgaaacgcaatgcgaaagaagtagacaacatgcttgaaagctggctggaggagcataaaaggaaaagactatctggtgtaaatggtgcagaggaggaagatttcatggatgttatgttgtcaatcatggaagagaacaagttcactggacgtgatagcaatactgtagtcaaatctactgtcctagccatgatcatgggtggaaccgatactacagccgtgagcttaacttggattttctccttgttaatgaacaaccgtcatgcactgaaaaaggcacaagaagaattggatatgcacgtcgggaaagacagacaagttgaagattcagacctgaaaaacttagtttacctcaatgctatagtcaaggaaaccatgcgaatgtacccactaggtgcacttcttgaacgtgaaaccaaagaggattgtgaggtaggtggataccacgtccgcgcaggcacacggttgttggtgaatgtatggaaactacaacgagacccaagcttttggactgatcctacagaattcaaaccagagagatttttaaccgagaacgcaaagacagatgttggtggtcaacatttcgagctactaccatttggagcaggtagaagggtatgtccaggagtctcatttgcacttcaattcatgcatttggttattgctcgtttgattcacggttttgaattgggtactccaatggatgccgatgttgacttaaccgaaagtactgaagggcatgtcaaccacaaagcaactccactcgatctcctcattgccccacgcctcgactcaaaagtttatgattactaa

SEQ ID NO: 33 - DNA, 1593 bp, Chelidonium majus
atgaggagtaattacttaaagccgacgacgacgacgatcgaggataaaagtaagaacaagataagcaggaagaagccaatagcagcaaaaccaccacctgaagcattgggcgcatggccagtgatcggtcactttcttctatttacagggaaagggttgactcatgtgactctaggagacatggcggataaatacggaccagcatttcttattcggttcggtagccatagaacacttgtggtgagtagttgggagatgatgaaggagtgtttttcggcccctaacgataagatcttttcaaaccgtgaatccaacttattatggattaagtcaatgttctacggttccaattcatatgggttctcaccttatgggccatactggaaggagctacgcaagatatcgacccaaaagcttctctcccaccaccgacttgatgcgatgaagcacttgcagatggtagaagttgatgcctcatttaaacagatttacaatttatgcaacaaaaatggaggttcaccatcacctagtagtattaatactactgctctggtgaacatggacgaatggttgtcacacctgatgttcaacgtgatagcaagaatggtcagtggataccaatccgatgatgtcgggacaggtgctacgagtactggggaaagattcaaggtttccatggatgagacgatgcgtcttatggccattttcgctgtttcagatttggttccatggcttgcatgtgtggatcgattaagaggccttacgagaaaaatgaaccgttgtggtaaggatttggactcgataattgggagactaatcgaagagcatcgtcaaaagagacgattatgcagaaataataaaggatcaaaaaatgaagatggcggtcatgatgatgatcaagacttcattgacatttgcttgtcaattatggagcaatctcagcttcctggcgataaccctgaaattgccatcaaatccattgtgctagacatgatatttgctggaagtcacaccacgactctggcaatgacgtggaccctctccttattgttgaaccatcgccacatgttgaaaaaagccaaggaagaaatagatgcacacgtgggtaatgaaaggcaggtggatgactcagacatccataatcttgtgtacattcaagccatcatcaaagaatccatgcggttgtacccgcccagcccactgttcgaacggatgacaatggaggattgtgaggtaggtgggttccacattccagctggcacacgcttatttgtcaatgtatggaagatgcaacgagacccaactgtgtgggaggatccattagagtttcgacccgaaagattcttgacgagcaagagagagatagatgtgaaaggccagcattatgaactcataccgtttggtgcgggtaggcggatatgcccgggcgcgtcatttaccttgcaggtgttgcatttggtgcttgctcgccttatccatggcttcgaaatgacgacgcccatggatgtaaaagtggacatggcgtcaagtgcagggctattcagtaacaagatgacgcctttggaagtgctgatcacaccacgtacagcctag

SEQ ID NO: 34 - DNA, 1674 bp, Chelidonium majus
atgaagatattgcaggagtttcatcaactcaccatttccaatattgttcttcttctacttatttctttcatctttttctctcttagtgcatggttcattgagagtactaattattattacagtagtaagaagaagaagagcaaaaagacaccaccacctgaggcatcgggtgcatggccagtgataggacaccttcatcaatttaaaccggacgatttacctcatgaggctcttggagacatggcggataagtacggtcctgtttttattgttcgattcggtagttatagaaaacttgtggtgagtaattcggagatggttaaggagtgtttcacggccgcaaacgataggtccttttcgaaccgtccggccgtcttagggattaggatcatgctctataacaccataacgtatgcgttcgcaccttatggaccgtactggagggagttgcgtaggatatcgtcgcagaatctcctctctaaccatcgagttgatatggtaaagcacttgcatgtcgatgaagttaataccttgtttaaacaactttacgagttatgcaacaaaaatggaggtcgaccccctactggtactaatactagtactagtgctgctctagtgaacatggatgactggttgtcaaacataatgttcaacgtgatagcaagaattgtcaatggaaacaacaaatccattaataatgagaggacaggtgccataaatgagaaaagatacaaaacagctatggatgaggcgaggcgtcttgtggcaatttttgcagtttcagattcagttccatggcttggatggttggatcgagtgagaggccttataagaggaatgaacctttgtggaaaggaactagactcaattattgaagatataatcgacgagcatcgtcaaaagagacgattatgcacaagtaaattaggatcatcaggagatgatgatgctgataatagtaatcttgaggaagaagataacttcattgatgcgtgcttgtcgatcgaggagcaatcgcagttacctggcgaaaatcctgaaatcgtcatcaaagctttgatcctggacatgtttgctggtggaagtgatggcccacattttgtgttgacgtggaccctcgccttattattgaaccacccccacgtgttgaaaaaggcaagagaggaagttgatgcacacgtggcaaacgatagacacgtggatgtctctgatatctctaatctcgtctacatacaagcaatcctcaaagagtcaatgaggttgtacccgcccaacgcactcattgagcgaatgacaacagaagattgtgaggtaggtgggtaccacattccagctggcacatacctattggttaacgtatggaaggtacaaagggacccgaccgtgtggcaggatccctctgagtttcgacccgaaagattcttattaacaaacacaaaaacggagatggagtatgaacatataccgtttggtgcgggtaggcgaagatgcccaggaatgaggtttgcattgcaggtgatgcatttggtgcttgctcgacttattcatgaattcgaaatcacgacacccgtggatgtaataaaagtcgacatgacggcaactaatgggttattcaatcacaaggccgtgcctttggaagtgctactcacaccacgtactcttatccgaggttag

SEQ ID NO: 35 - DNA, 1626 bp, Chelidonium majus
atggattattcagtccttctccagtacggctggtttgctccttccatggctgcccttcttgccttagctttcctttacaatctctttttggcttcatctccgaaagctactagcaagagaacaataagtacaaagaaaccgcccatggcagccggtgcatggccaattcttggtcatctccatctgtttaaagagggtgagttgcctcaccaaatgcttaaatccatggctgacaagtatggtcccgccttcctcatgaagttcggccaacaccgatccctagttgtgagtgactaccgcatcgtaaaagaatgttttactactaatgatacccacttttgcaaccgtccatccactacagctttcgatgtcatgacttacgctaatgaatcggtagctttcacagaatacagtccttactggcgcgagcttagaaagatatccactctcaaacttctctctaacaaccgtctccaggccatcaagaacctccgagaagaggaggtgaatgttagcttcaaggggttgtatgattcatggaagaataagaacaacaagagtaccggcagtgttggtgatgaacgagctccggttttggtcgacatgaagaaatggtttgaagaggtgtcaaacaatgtggtgattagggtaatcgtgggcaaatgtaattttgggactaagatcgtgcaaggtgagaaggagggtgtagagtacaagacaatcatggatgagcttttacgacttgctagtttgtctttgttatccgattttgcccctatacttggtttgttggatttcttccaaggtcatgtccgtaccatgaaacgaaatggcaagaaactagacgtgttacttcagaggtggttggaggagcataagaggaagaagagcacaccagaggatgagcaagacttcatggacgttatgctgtcggttattgaggagagcaagctttctggctatgacgctgataccgtcattaaagctacttgtctggccatgatcatgggtggaacagacacatccgcagtgagtctaacatggatcgtctctttactgatgaacaatcgtcatgcactaaaaaaggctcgagaagaattggacgcgcaggtggggaaggatagacaagttgaagattcagatctaaagaacttggtttacttgaatgccatcgttaaggaaacaatgcgattatatccactaggtactcttcttgaacgcgaaaccaaggaggactgtgaggttggtgggtttcacctcgaaggtggtacacgtttactagtgaacgtatggatggtacaacgagacccaagcgtgtggactgatccgacaaagttcacaccagagaggtttcttacggagaaggcagacatagatgtttggggtgggaattttgaacttataccattcggagcgggtagaagggtgtgccccggagtgtcctttgcacttcaattcctaaatttggtactagctcgtctcattcatggatatgaattgggaactccagatgacgcggatgtggatctaacggagagcccagaaggacatctcaatcacaaagcatcacctctcgagcttctcctcaccccacgcctcagtaaccctaagctctatgattattag

SEQ ID NO: 36 - DNA, 1614 bp, Chelidonium majus
atggagtttctctctctagaaccccaactaatttccatttttgttcttcttcttgcttcatccatattcctctacaatctcttgaagaatcatggaaggaaatccaagacctcaaaaccaccagcacctgtagcatcaggtggatggccaatcatgggtcatctccatcttttcaatggaagcgagttaactcatcaaactctaggttccatggctgacaaatatggtccagctttcaatatccaactcggttctcatcaaacactcgttgtgagtagttgggagattgttaaagaatgtttcactacaaacgaccgattcttttcgaatcggcctggatcgttagcgattaaactcatgttctacgacgctgattcagttggttacgcaccgtacggtgcttactggagagatcttagaaaaatctctacgttaaaactcctttcgaatcatcgagtggaaaccctaaaacatttgagaacttctgaagctgaatcatgttttaaacaactgtataatcagtggaagaacaacaaagttggcggcgacgacgatgaatttgctatagtgaggatggataattggtttggagacttgacatttaacgttgtggcgagaattgtcgccggaaaaaagaattttgctggaggtgcgacgagtggcgacgtcggagctaagagatataaggaagctatggatgaagcgttccggttaatgacgattttcgcgttctcagatgtggttccgtcgttaggatggttggataaattgagaggtttggttggagggatgaagcgttgtggtgcggaaattgattccattgttgggggttgggtggatgaacatagattgaagagagcttctagaaagggaggagatcataatgatctcgatcttgaacaagattttatagatgtttgcttggagattatggaacattctactttgcctggtgatgatcctgaaattgtcatcaaatctacttgtctggacatgattttgggtgggagtgacacaacaacggtgaccctaacatgggcactctccttactattgaacaatcctcacgtattgaaaagggctagggaggaattggacacacacgtcggaaaggacagacaagtagacgactccgatatgtctaatcttgtgtacatccaagcgatcatcaaagagacgatgagattgtacccagcaggaccactgatcgagcgaaggacatcggaggattgtgaggtcagtgggttccatgtaccggcgggcacacgcttaatggtgaacttatggaagatgcaacgagatgggagcgtgtataaggaggatccattggagtttagaccagagagattcttgactagcaatgctgatgttgacctaaagggacagaattatgaactgataccatttggtgcgggtaggaggatatgtcctggtgtgtcgttcgcagtgcagttgatgcatttggtgcttgctcgtcttgttcatggctttgaaatgaagacggccggaggtgcaaaggttgacatgacagaaagtgcaggactaattagccacaaggttacaccgctacaagtgctgctcaaaccacgccttgcgatccaacaagctttataa

SEQ ID NO: 37 - DNA, 1653 bp, Chelidonium majus
atggattcgatgaacctgtttcaacaagcgattgcagtaggtacccttgtcatcttcctctactatctatggaagtggacatcaataatattcactcgaactcaccaggcggcgccaccagaacctgccggagcatggcctattataggacacctccatctcctagcaggaggagcaaaccaactcgtatatcacatacttggatccatggctgacaagtacggcccaattttcacggtccgactcggcatgcgacgagccttaatagtgagcaactccgagttagcaaaagagtgtttcaccaccaacgacagaatcttttccactcgccctagttcagtagctataaaattgatgggctacgattcagccatgtttggcttcgcaccatacgggccttactggcgggagatgcgcaagatagcagtaactgagcttctctctaataggcgcctcgagatacttaaaaatattaggatctccgagatcaacatgtctataaaagatttatatcaactctgggttgagaataagaacagtggtgttgatggcggcggtgacggtggtgaggtggtggtgggatcaccggttttggtggagatgaagaggtggtttgaagatgtgtcgttcaacgtggtggttaggatggtagctgggaaaagatatttcgggagaagggttgaaagtgatgatcgtgaagaggaggaggcgaggaggtggcagaaggcgatgaatgattttatgcatttggtggggattttcgtggtgtcggatgccattccatttttagggtttttggatttccaaggatatgagaaggagatgaagaagacggcggttgagattgattatgttatgggaagatgggttgaggagcaccaacggcggaagctggagagggtggcggggggatctgatgatcaacaggaagatttcatagatgtgatgttgtcgatcttaaaagatggtgatcagttctatggttatgatcctgatacggttattaagtcttcatgcctgtctcttgttttaggtggtagcgacacaatatcagtaacactaacatggacggtctccttactgctaaacaatcgcaatgtgttagaaaaagctcaaagtgagttggacatccacgtaggcaggggaagacaagtggacgaatcagatatcaacaatcttaaatatctccaagccatcgtcaaagaaaccatgcgtttatacccagctggaccactatcagcaccaagagaggctatggaagactgcaccatagctggattccatgtccctaaaggcacacagttgatgctcaatctatggaaattgcatcgagaccctcgcgtttggtcggatcctttggagttcaaaccggagaggtttcttactactggcacccatggagatgttgatgttaaaggacaacatttcgaattattaccgtttggagctggtaggcggatatgcccagggatatcttacgcccttcaagtcttgcatttgacccttgctcgtcttcttcatagttttcatttatcaacgccatatgatatccccgtcgatatgactgaatcttctggactttcttgcccaaaagcaactcccttggatgtcctccttacacctcgtctcccttcagagctttatgtgtcttaa

SEQ ID NO: 38 - DNA, 1686 bp, Chelidonium majus
atggatttgttcatcttcttcagccggttccaatatattgtaggattattagctttcctgaccttcttctattatctatggcgggtttcaattacaggaacaaggatcaaaaccaaccaaaacatcatgaacggcaccaatatgatggcaccggaagctgccggtgcgtggcccatagttggtcatcttcctcagctagtaggccctcagccactcttcaagattcttggagacatggccgacaagtacggttcgatattcatggttcggttcgggatgcacccaaccttggttgtgagcagttgggaaatggcaaaggagtgcttcactaccaatgacaagttccttgctagtcgtccaactagtgctggaggcaagtacctcacctacgactttgctatgtttggcttctcattttatggcccctattggcgtgagatccgtaagatctccacgctcgaactactatcccatcgtcgcgttgagttgctcaaacatgtcccttacactgagatcggcggctctatcaaacaactttacaaactttggatggaaacacaaaaccaaaataagcaacgggatgatcatcaggtaaaggtcgacatgagccaagtgttcggatatctaacattgaatacagtgttaaagctagtggtaggaaagggtctattcaacaacaatgacatgaatcatgaacaggaagaaggtcgaaagctccacgagacagtacttgaattcttcaaactggcaggggtctcagttgcatcggatgctcttccattccttggctggctggatgtagatggacagaagagaagcatgaagaggatagccaaagaaatggatttaatcgctgaaagatggcttcaagagcatcgacagaaaagactaacatcaaacaacaaggctagcagcggccatgacgacttcatgagcgtgttgctatccatccttgacgacgattccaatttcttcaattacaatcgtgatactgtcattaaagccacctctctgaacctgatattagcagcttcagacactacatcagtgtccctgacttgggttctctcgttattagtcaccaaccccggtgccttgaaaaaggtccaagatgaactggatactaaggtgggcaggaacagacatgtcgaagaacgagacatcgagaaactggtctacctccaagccacagtcaaggaaactctacggatgtacccagctggtccactatcagtaccccacgaagctacccaagactgcaccgttggtgggtatcaggtaacagcaggcacacgtttggtggtgaacgtgtggaaattgcaacgcgacccgcgtgtgtggccaaacccatctgagttcaagccggagagatttctaccagacgggtgtgaggttggttgtggtgaagcagcaaatatggatttcagaggacaacattttgaatacataccatttgggtcaggaagaaggatgtgtccagggatcgactttgccatacagatcatacacatgacactggcctgcctactccatgcattcgagttccaggtgccctcatcactagataaacatcttgtacctgcagtaatcgacatgagcgaaggttcaggactcaccatgcccaaagtaaccccacttgaagtcctccttaacccacgcctacctcttccgctttatgagttataa

SEQ ID NO: 39 - DNA, 1569 bp, Cissampelos mucronata
atggaggccatgggtgaatattttcagcttatttcatggactgtgttttcggctttgatcaccatctactttatattcagtaggaagactaatggaaaaaagaaggcaccggaaccaggtggtgcatggccgattattggtcacctccatctttttggagctcatgacctgttgtaccgaaagcttggggccatggccgacaaactcggcccagtattcatgatccgttttggcatgcatcgagccgtcgtcgtaagtaactatgaagtagcaaaagaatgcttcactgtcaacgataagatactcgcaagtcgcccacggattattgcttcaaaactcatgggctacaaccatgcggccgttggattaagcccttatggcccttattggcgagaggcacgtaagatagccaccttggaacttctgtctaaccatcgactccaactactcaagcacatcaggatatcagagattgatatgtggataaaagagctaaaagaattttgtatgaaaagcagtagcgatggtccagttcttgttcaattagatggatggttcaatgctttgacacttaatataatggttaggaatatagccggcaagcgatattgtggcggtgctgaagcctttgaagatgaagagtcgcagcgatggaagaaagtttctagagaacttatgttcttgttcggagtctttatggtacccgatgcatttcctgtactggaaggcatagatgtgcagggtttcgagcgagccatgaaaagggttggtaaggaaatggatttcttcttgagtcgatggttggaagagcatagaaggaagaaaatagaactctccgagaaaggaaacgaagttaatgatcaaggagctcaagatttcatagacgtgatgctgaacacaatcaaggatgccaagatctttgagcatgacgctgatacgatgatcaaagccacttgtatggctctagttgtagcagggaacgacacgacaatgatcactctatcatgggcagtttcattgttgctgaataatcgtggagttttagagaaagcccaggaggaattgagcaaccagataggaaaaaacaggcatgttgaggaaggagacatcgagagcttgccttaccttcacgcaattgtgaaagagaccttccggctataccctgctgcaccactttcattaccacatgaagctatggaagattgcaccattgccggctttcatgttcctgcaggaacacgcttgattactaatatttggaagctgcataaagatcctaatatttggcctgacccattggagttcaagccagagagattcctcactactcatgcccatgtcgattttaaaggtcaacacttcgaattcatccctttcggatcaggaagaaggatgtgccctggatcgtcgctagcaatcagtgttttgcacctcacccttgcacgtttgctccatgaattcgagcttaaaactccggatgatgcaccggtggacatgaccgaaggtccgggtatcacactcatgagagcaaacccccttcacgtgctcattaatccaagacatgactga

SEQ ID NO: 40 - DNA, 1605 bp, Cissampelos mucronata
atgtcctcgcccatccaacaactactcctctccttgacctccattaatggcggaaccatcatctcagccgtcataatatcactccttctcatcctcacccttcatcgcctcctaaaacccattaattccaacaaaaccaaacaccctccaagagcatccggggcatggcccgtcatgggccacctccacaagctccgcgggccggacctcccccaccgcaccctctcatccatggccgaccagtacggcccaatcttcacaatcaatctgggccccaccaccgccctcgtcatcagcgacccagccgtcgcaaaagagtgcttcaccaccaacgacctcaccttctcctctcgaccgaccactctcgccaccactctcatgtgctacaacaacaccatgttcgggttcgccccgtacggcccgtactggcgcgaagtccgcaaggtcgtcatggcccaactcttatcaacccgtaggctcgagtcactcaaaaacatttgggcctcggagattgaccgctgggttaagggcctggcccaaaaggcccaaagtgggtcgcatggtgtggttgaggtggagatgggtgattggctggcgaggttgactatgaacattgggctaaggttggtcgtggggaagagttgtggtgagatggggagtgaggagtcggagaggtgcttgggtgctatgcgggagtatccggagttgctgggtcggttcgcgttggaggacgcgttgccgtggttgggtcggtttgatttgcaagggcatcagagggagatgaggagggctgcgagggtcttggatgagattcttgatgggtggttggatgagcataagcgaaatagatcggggttaagtggtggtgatgatcatagggatcaggattttatggatgtgatgttgtctgttcttgaacaagatcaagattcgagtcttagcgaccatgatgctgatatgatcaacaagtccacttgcctgaatctaatcttaggcatggctgataccacaatggtggccttaacatgggccatttctcttctcctcaacaacaaaacgtccctcaagaaggcccaagaagaattacaagcccaagttggcaatgaaagacacgtggacgaatctgatgtcaagaacctagtctacctccaatccatcataaaagaagtgttgaggctttacccaccagagccactatcgggcccacgagaggcccttgaagactgcgaggtggcaggataccatgtcccgcgaggcactcggcttatcgcgaatttgtggaagatccatcgtgactcgtccacgtggcaggattctatggagtttcgaccggaaaggtttctgacggcccacgaacacgtggatgtgtggggccagcacttcgagttcatgcctttcgggtcgggtcgaaggtcgtgtccgggagtctcgtttgaggttcgggtgttgccattgatactggctcgtttgatacacgcattcgagatgacgacacgtggagatgtgccggtggatatgagtgaaagaccgggccttgttatctcaaaagcaagcccacttgaagttatgatttctccgcgcttgccccttcacttgtttgaataa

SEQ ID NO: 41 - DNA, 1611 bp, Cissampelos mucronata
atggagtttcatttgcttctccaagcagttgcagcaactctagtgaccttcttcctttatgagctatgggctctaaggaagaagttcagcaggcttaccaaaactccctcatcaaaggctttgctcaaagcaaagtgcgcaccagagccgcccggtgcgtggccgatcatcggtcaccttcctttgctggtttcagccaagcagcctcatcgggcatttgctgcacttgctgagaagtatggtccagctttcatgctccgcatgggcatgagtcctatgctgattgtgagtaccaaagaggttgccaaagaatgttacaccgccaatgatcatgtgtttgctactaggcctgtcaccaccgctgggaagctcatggcttatgatcactcggtcatgggcttcactccttttggaacctactggagagaaatacgaaagatcgcgacggtggagctgttctcggctcgcaggatcgggatgttgaagccggtaagacagtctgaggtctcgttgtggatgaagggattgcatgagaagtgggtgcataatggaaatagctcggtctccgtggagctgaagagtcaactggaagaactcactttcaatttgcttacacaaatggttgccggaaagcgttactacggaagtaacgttgcaaaggtggatgagaagatggcggggctatttcgccacgccgtccaacaattcaattatcaccttgggaactcggagatgtatgatgccttgccattcatggcatggttggacttcaagggcgacgccaaggccatgaaaaagacacaaaaggacttggattttattatgcagacttggttggacgagcaccgcctaaaagcggatcaaatgcgcggggacgccatcaacaacaccagagacttcctcgacgtgctggtgatgatggagaagaccggccaattttcatcggcaattaaagacagagacactacaattaaggccttggctctgacccaactagtagccggagtggacagcatggccaacacaatggtgtgggtgttggctctcctaatgaacaacccagaaatgctagccaaagcacaagacgagctcgacaacaacgttggcaaagacagactcgtggaggagtcagatatccctaatttgaagtacttacaagccctcctaaaggagaccctccgaatgtaccccgtggggcctttgttggtgccgcacgaggcaacggaggattgccacgtggccgggtattttgttccacgtggaactggcctgttcatcaacgcttggaccatacaacgtgacccaaatgtatgggctgagccgaactgttttaatccagagaggttcttaaccactcatgcagagatggacgtgaagggtcaaaatcatgagctgttgccattcgggtcgggtaggcgatcgtgcccaggtgtgggactggccctccaagtgatgcacctcaccttggctcgaatattacaagcgtttgagttgaagactcaatcgggtgttggaattgacttggaagagtgctccggcatactgctttccatgatgcacccattgcaagtgatgatggcacctcgccttccttccgaactctatgattga

SEQ ID NO: 42 - DNA, 1575 bp, Eschscholzia californica
atggattccttaatccttaccaattggtttccaatatcaattgcttctgttttaaccctagttttcctttacaaagtcttactttcctcaagaactcttaaagataagaagattaagacttcacccatggcaaatggtgcatggccaattcttggtcatctccatctctttggttcaggtgaattacctcataaaatgctagctaccatggctgacaagtatggctcagccttcaggatgaagttcggtaaacacacaacactagttgtgagtgatacccgtatcgttaaagaatgtttcactaccaacgataccctcttctctaaccgtccttccactaaagcttttcaactcatgacttacgataatgagtcggttgcctttacaccttacggtccttactggcgtgagcttagaaagatatccactcttaaacttctatccaaccatcgtctccaagccatcaaggacgttagagcctcggaggtaaacgtatgcttcaaaagcttatacgatcagtgtaaaaatccaagtggagctcctattttgattgatatgaagaaatggttcgaagaggtgtcgaacaacgtggtgatgagggtaattgtggggagacaaaactttgggtctaagattgtgcaaggtgaggaggaagctatccattacaagaaggtcatggatgagctcttacgtctcgctagcttgtctatgttctcggattttgctcctttacttggtttcttggacatctttcaagggaacttgagtgccatgaaacaaaacgccaagaaggtagacgcaatccttgagaactggttggaagagcatcggaagaagaagaactcagttgctgaaagcgagcaagatttcatggatgttatgttgtcaattgccaacgagagcaagttgtctggtcacgatgccgatactgtcattaaagctacttgcctagcaatgattatgggtggaacagacactactgctgtaagtctaacatggatcatttctttattaatgaacaatcgccatgctttgaagaaagctcgagaagaattagatgcactagtaggaaaggacagacaagttgaagattcagatttaaagaatttagtatacatgaatgctatcgttaaggaaacgatgagaatgtacccgttaggtactcttctcgaacgcgatactaaggaggactgtgagatcggcgggttccatgtcaaaggtgggacgaggttgctagtgaatgtgtggaagttgcaacgagacccaaatgtatgggttgatccaacagaatttagacctgaaagatttctaaccgagaatgcggatatagatgttggaggtcagcattttgagttgctaccatttggagcaggacgaagggtgtgtcctggggtgtcgtttgcactacaatttatgcatttagtacttgctcgtctcatccatggatacgatttgaatactctaaacgaagaaaatgtggatctgacggagagcccagaaggacatgtgaaccacaaagcatcgcctcttgatctcatcctcacccctcgtctacattacaagttgtacgaatag

SEQ ID NO: 43 - DNA, 1599 bp, Eschscholzia californica
atggatactgcttcatcaatttcccttctcctcccttgggcagtagtagttccctccatagctacccttcttgctttgctacttttcctcttcatcacttcaccaaaaacacccaagaggaaaacaagttcaaaaccaccacccactgttcttccaggtgcctggccaattctaggtcatctccatctctttaaagaaggagaatcacctcaccacatgcttaagaacttagctgataaatatggacctgctttcgtcatgaaattcggacaacatcgttccctagttgtaagcaacactaaaattgttaaagaatgttttactactaatgacaccctcttttccaaccgtccatctactactgcctttgatctcatgacttatgctcatgactcggtagctttcacaccttatagtccttactggcgcgagctaagaaagatatcgaccctcaaacttctatctaacaaccgtctcaaagcaattaagaagctccgaggagaggaagtggacgtttgttttcgtgggttgtacggtttatggaagaataaaactaaaaatggtgctccagtcttggttgacatgaaaaaatggtttgaagaggttgcaaataatgtggtgattagagtgattgtggggaaacttagttttgggaccaagattgttgatggtgaagaagaagccgttgaatataaaacagtcatggatgaactcttacgtcttgctagtttgtctttgttatccgatatggctcctatactcggttggttggatttcttccaaggaagtgttcgtaaaatgaaacaaaccggtaaaagactagacgttttacttgagaaatggttgggggagcaccgagagaagaagaacttggttggggaagatgagcaagatttcatggatgtcatgttgtcgatcgtggaagaaagtaagctatctggccatgaagctgatgccgtaattaaagctacatgcttggccatgattatgggtggaacagacacaacagcagtaactctgacatggatcatctccttattgatgaacaatcgtcacgcactagaaaaagctagagaagagttggagacgcacgtcggaaaagatagacaagtggaagatacggatttgcagaacttggtctacttgagtgctattgttaaggaaacaatgcgattgtaccctttgggtactcttctcgaacgagaaactaaagaagactgcgaggttggagggttccacatccaaggtggaacgcgtttattggtgaatatatggatggtacaacgagaccccaccgtatggaatgacccgtcggcatttaaaccagagaggttcttaacagataaatcggaaatagatgttgggggtcaacatttcgaactgataccatttggggctggtagaagagtgtgtcctgccgtgtcgtttgctcttcaattcttgcatttggttctcgctcgactcatccatggatatgacttgggcactccaagcaacgtggaagtagacttgactgagagcctggaaggacacgttaatcataaagcatctcccctcgaactcctcctcactccacgcctcaacccgaagctttattaa

SEQ ID NO: 44 - DNA, 1647 bp, Eschscholzia californica
atggaatctgagatccaatatcaaactgcaacaatggcttccattcttagtactaatttgattctaagcagtatttttactgcttttcttctctatttcttactaaagatgagtccatttaggtcatcaaaaaacaagtcaagaaagcaagcaccaaaaccaactggttcatggcccattataggtcatctccttcatctccaaggaccaaaccttcctcacataaacttagcagctttggctgataagtatggatcagtgttcagcttccgtattggtctccgtccagccctcgttgtcagttcttgggagatagctaaagagtgtctaactacaaatgatagagtcttcgtctctcgcccgccgttaatagctatgaaacacatgggttatgaccacgccttgttcggattctccccttatggtccatactggcgcgaactccgtaaactagtgaaccaagaacttctttcgaacactaggattgagttgataaaacatgtttgggatactgaaataaatacattcattaatgacctttatgaagtttgggctatgaaaagtaatgaaggtgggggtgatgttgtggttgaaatgaagcaatgcttgtacgattttactctcaatctcacactaaaaatacttaccggaaaacggtatttcggtggtggtggcagcgaagagttaagagaagaagcaggaagatgtcaaaaagcagtaagaaactttcttaggttagtgggtacttttacagctcaagatgtcattccatttttggaaggttggttagacttgggtggtcatgagaaggagatgaaaattacaggaaaagaactcgactccctacttcaaaaatggttagaagaacataaagtaaagaaatcgtcagctggggaagaaggccaggagaatcgaggtggtgatgaagaagatttcatgggggtgatgcttacaaaacttcgtgatcacgagaagcttttaagttattacgatgctgatactatcaacaaggctacttgcttgactgtaatcctaggtgggagcgacaccacgatgatgactctagtatgggctctcgctttactagtaaatcatccgcatgtaatgaagaagctccaagatgagttggatacccacgtaagtaaagaaagacaggtggaagaatcagatatcaagaacctcgcgtatcttcagtctgttatgaaggaaacaatgcgtcgttacccagggacccctctatatgttagagaatcgatcgaggattgcactatagctgggtacgacgtcccaacaggaacccgtcttgtagtgaatgcgtggaagatccaacatgacccacaagtatggtctaacccattcgagttcaatccagagagattccttacaacccacaaggacatagatgttagaggtcagaatttcgaacttatcccatttggagcaggcaggagaatgtgccccggggcttcactcggtcttcaagtggtgcacctgactctggctcgtctagtacatggatttgagtttaaaacaccagatggcgaacccatggatatgacggagagtataggactaactaatcttaaagccactccacttgaaattatgctcactccgcgcctctcttccaaactatatgtgtgttga

SEQ ID NO: 45 - DNA, 1665 bp, Eschscholzia californica
atgggtctttcatttgatctttcttctcataactttcttcaattctcgaaccccactattctcattggcctctttggtttactagtttaccttttactagtaaatcttcgaaaacgaatatcacgaaaaaatgaggcacccgaagtggagggtgggtggcctatcataggtcatcttcatcatttcatgggtgggaaaaacaagctactccatgtagcatttggagcttgggctgataagtatggaccagtctatactctgaggatgggtctgaataaagtactagttgtgaatagtgcagaagtagcaaaagagtgttcaaccactaatgacatgctttttatggctcgtccatatcgaatagcctctgagatcatgggttatggatatgcgatgtttcctatcgctccttatggaccattctatctcaaaatgcgaaaaatggtcacccaagagcttctctcaaatagtagggttgattctctaaaacatgtgtggggttctgagataaaaaatgccattcaagaacttcacaagaaagtattatcaactaaaggtggtggtccaatttcaatggacatgaagggatgggtttccaatttaacgttccgaacggctatgaaggtgatttgtggtggtgttggtgttgatggtggtggtggtggtggtggtgctacttctcctgcaactagtattggagaacataattatgatgaagttggaagttttcaaaaagcattgaaagaattctttgttttactaggagaaattaggatttctgatgtgataccattcctagggtggttagatatgcgaacagggtacgtggaaaagatgaaggacaatggaaaatttctagacaatttaatggaggaaatgttggaagaacacaaaaggaagagaaggtcactaactgaagaagaggaaaaagatggaggttatgtggagcaagatttcatggacgtaatgatatcgaaacttaatgatccaaagcttctgtcctattatgacgctgatactatcaacaagtctacttgcctgactctaattttaagtgggagtgagacaacgatggttagtatagtttgggccttagcgttactagtcagtcatccacacgtgttaaagaaagcgcaagatgagttggatacgcttgttggtcgggaaagacaggtagacgaatctgatatcaaagatttggtatacctccaagctgtagttaaggaagcattgagactatttccaccggctccactttcaactccacgcgttgcaacagaggattgtgtcgtatcaggatatcatgtacctgcagggacccaactttttgtaaatacttggaagattcaacgtaacccggaagtatggcctgaaccatcagagtttagacctgagagatttttcacaacccacaaggatttcgacgttagaggtctacattatgacctccaccctttcgggtctggtagaagagcatgtccaggtgctggcttcgcccttcaagtggtgcatctaaccctagcttctctattacatgggttcgagattaaaaacccatcggatgaacccattgatatgactgagagtccaggagtaactaacttgaaagcaaccccactgaaagtcctcctgacccctcgcctcttctctaaagaagtttattaa

SEQ ID NO: 46 - DNA, 1686 bp, Eschscholzia californica
atggagaagcccatcctcctccagctccaacctggtattttaggcttattagctttgatgtgcttcttatattatgtaataaaggtttcattatctacaaggaactgtaaccagttggtgaggcatccgccggaagctgcaggttcatggcctatagttggtcatcttcctcaactagtaggctctggtaagcctctgtttagagttctcggagacatggctgacaagtttggaccaattttcatggtgcgatttggagtacacccaaccttggttgtgagcagttgggagatggcaaaggaatgcttcacctccaacgacaagttcctggctagtcgcccacctagtgctgctagcatttacatggcatacgaccacgctatgcttggcttctcctcttatggcccatattggcgtgagattcgtaaaatatcaaccctccacctactctcccatcggcgccttgagttgcttaagcacgtccctcacttagagatccacaattttatcaagggattgtacggaatttggaaagatcatcaaaaacagcagcagcagcctactgcgagagatgatcaagattcggttatgctggagatgagccaattatttgggtacttgaccttgaacatcgtattgagcttagttgtaggaaagagggtttgcaactaccacgctgatggtcatcttgatgatggggaagaagctggccaaggtcaaaagctccatcagacgataactgatttctttaaactgtcaggggtttcagtggcttcggatgctcttccgttcttaggcttgtttgatttggatggacaaaaaaagatcatgaagcgggtagccaaggagatggactttgttgcagaaagatggcttcaagataagaaatcgagtttgttgctgtctagcaaaagcaacaacaaacagaatgaggcaggggaaggcgatgtggacgatttcatggacgtattaatgtccacactcccagatgatgacgattcctttttcacgaagtatagtcgagatactgttattaaagccaactccctctctatggtcgtagcaggctcagacacgacatctgtttctttgacatgggctctttccttattactcaacaacatacaagtcctaagaaaggctcaagatgagctggacacgaaagtcggtagggacaggcatgtagaagagaaagacatcgataacttggtctatcttcaagctatcgtcaaggaaacactccgcatgtaccctgccggtccactttcagtaccacacgaagccattgaagactgtaatgttggcggataccacataaaaacaggaacccgtctgctggtgaacatatggaagttgcagcgcgacccacgagtgtggtcaaatccatctgagttcaggccagagagatttcttgacaaccaaagtaatggaacactgctggatttcaggggtcaacattttgagtacataccatttgggtctgggcggaggatgtgcccaggcgtgaaccttgcaaccccgattcttcatatgacactagcacgcttactacaatcattcgacttgaccacaccctcgtcatccccagtagacatgactgaaggttcaggattgacaatgcccaaagtaactccacttaaagtactactcaccccacgcctccctcttccactttatgattattag

SEQ ID NO: 47 - DNA, 1698 bp, Eschscholzia californica
atgaatttgtctagcaaattgatgggttcatttgatcttttctctcttaactttctccagttctcaaaacccgccagtatggttattattggcatttgtagttttctagtttacttttcactactaaatcttgtaaggcgagtactagcaccgtcttgtacgatgaaaaacggaaaaactgagccaccggaggtggaaaacgggtggcctattataggtcatcttcaccatttcatgggtaaaaagaataagctaatccatgaaatatttggagacatggctgataagtatggaccgacctttactttaaggatgggtctgactaaagttctagtagtgagtagtgccgaagtagcgaaagagtgtttaactacaaacgatttggtattcattggtcgtccacctcgtgtagccaattcactccttggttatagttttgccatgtttcctttttcgccttatggcacatactatagccaaatgcgaaaaatagtcacccatgagcttctctcaactagtagggttgagtctctaaaacatgtgtggaattctgagataaacaaagccattcaagaacttcatcacaaagtagtatcagttggaggtggtagtcctgttttaatagaatttaagcgttggttttcggatttaacgttaagaactactgttaagttgatctgtgggaagcagtactttggtacggatggtgctactcaggcgagtatgactattaatggaggaggagatgatgatgaagctgggaagtttcaagaggccttgagagagttcttttgtttactaggaaaatttagggtttctgatgtgataccatttttagggtggttagattttggaacaggttataaggaaaagaaaaatagaatgttcattgatagtttaatggaggaatggttggaagaacacaaaatgaagagaagattactaaatgaagcagataaaaaagaaagtcgtatagagcaagatttcatggatgtaatgatctcgaaacttgatgatcctaaccttctatcccattacgatgctgatactatcaacaaggctacttgcttgactttgattttagggggaagtgacacaacaatggttagtttggtttgggccttaacattgttaatgaatcatccacatgtgttgaaaaaggtccaagatgagcttgatttccacgtaggtcgtgagagacaggtcgaagaatctgatatgaaaaacttagtatatctccacgctgtaatgaaagaggcaatgagactaaatccagcaggtacgttatcggctccacgtatgtcaacaaaggactgcaccgtatccgggtaccacattcctgcaggaacccatctattcatgaatacttggaagattcaacgcgaccctaatgcatgggttgaaccaacagagttcagaccagagagatttctcactacccataaggatttcgatcttagagggcagaactttgaactcctccctttcgggtcgggtagaagatcatgtcttggtgctaactttgctcttcaagtgttgcgccagactctagctcgcttgttacatggattcgatctcaaaactccatcagatgagcccgtcgatatgactgggtctgctggactaattaatatgaaagccactccactcgaagttctagtcaccccacgcctcttctctagtgaattatatgggtaa

SEQ ID NO: 48 - DNA, 1853 bp, Eschscholzia californica
atgctcataaaacctctcgggagcaagataacatctcctcctccctccagtgtcaaagaaaaaagagaaatccgaagggtcgtcatgaggtatataagtgggcttaaacgatgcaaaatcagcaagataaagccaattccaagatgtaaccaaaacattctcgcatttaatatcaccatgacaaacaccaagtatcttccaatgaatttgctcatcttcttccaattcctcctccaattccaagttcttgtaggattatcagttttgctagccttctcctattacctatgggtttcaaaaaatcccaaaatcaacaaatttaagggtaagggtgccttattagcaccccaagctgccggggcatggcctattgttggtcatctccctcaactagtaggccccaagccgctcttcagaattcttggagccatggctgacaactatggacctatcttcatgctccgattcggggttcatccaactgtcgtcgtgagcagttgggagatgacaaaggaatgtttcactaccaacgataggcaccttgctagtcgtccatctaatgctgcttcccagtaccttatctacgaagtctatgctttgttcggcttctccttatatggtagctcatattggcgtgatgctcgtaagattgctacgctcgaactactctcccatcgtaggcttgagttgctcaagcatgtaccttatacggagatagatacatgtatcaaacaattgcacagactttggacaaaaaataacaaaaaccaaaacaaccctgagcttaaagtcgaaatgaaccaattttttactgatctaaccatgaatgtgatattgaagttggttgtaggaaagcggtttttcaacgttgacgatgcagcggatcatgaaaaagaagaagctcgaaaaatccaggggacaatatttgagttttttaaacttacggagggttcagtttcagcaggtgctcttccattactaaattggctggatctaaatggacagaagagagccatgaagagaacagccaagaagatggactccatagctgaaaaattgcttgacgagcaccgacaaaaaaggctatcaaaggaaggtgtgaaaggcactcatgatcataatgacttcatggacgtattattgtccattcttgatgctgatcaaggagattattcccatcatccattcaactacagtcgcgaccatgtcataaaagccaccactctgtcaatgatcctctcttccatgagcatatctgttagtctttcatgggcactctctttattactcaacaaccgccatgtcttaaaaaaggcgcaagatgagttagacatgaacgttggcaaggacagacaagttgaagagggagacatcaagaacctggtctatctccaagccattgtcaaggaaacattccgtatgtatcctgcaaatccacttcttctaccccatgaagctattgaagactgcaaaattggtgggtttaacgtaccagcaggcacacgtgtggtagtcaacgcatggaaactacaacacgacccacgcgtgtggtcgaacccatccgagtttaagccagagaggtttctcaatgaccaagcagcaaaggtagtagatgtgagaggtcaaaattttgagtacttaccatttgggtctggacgaagagtgtgtccaggaatctccttctccctccaaaccattcacatgtcactagctcgcctagttcaggcattcgagctaggaacgccctcgaatgagcgcatcgatatgactgagggttccggcttaaccatgcccaaaacaaccccgcttcatgtccttcttaacccacgtcttcctcttccactctatgaatg

SEQ ID NO: 49 - DNA, 1599 bp, Eschscholzia californica
atggagtttcattttcctctcatggaacaattccaaccatttttcatttttgcccttcttctagcctccttcatttttctctacaaactcttcaattttggaaacagaatcactaaaaatgggaaaccaacagctccggaagcatcaggaggaagactaattatgggtcatcttcatctattcaatggaactgagttaactcaccggacactcggttctatggctgataaatacggtccagctttcaatatccgattcggttcacataaaacacttgtagtgagtagttggaaaattattaaagaatgttttactacaaatgaccgattcttttcgaatcggcctggttctttagcaatcaaactcatgttttatgatgccgattcagttgggtatgcaccatatggatcgtactggagagaacttagaaaaatttcaaccttaaaactcctttcgaaccatcgtttagaaaccctaaaacatttgagaacttctgaagttgattcttgttttaatcaactaatgaattcttgggctgaaaacaaaaacaggggagactctgattttgctccggtgaggatggatgattggtttggggatttgacgtttaatgttgtagcaagaattgttgccggaaagaagaatttcgccggaggagcagcgagaggtgatgccggagctcagagatataaatcagccatggatgaagcttttagactgatgacaatatttgcttattcagatgtgattccatctcttgggtggttagataaattgagaggactagttggagatatgaaaagatgtgggtctgaaattgattcagtagttgagagttgggtggatgaacatagattgaaaagaagggtttctaagaaaggaggtgaattagatcttgaacaggatttcattgatgtttgtttggatatcatggaacattcttctttgcctggtgatgatcctgaaattgtcatcaaatctacttgcttggacatgatattgggtggaagtgacacaacaacagtaaccctgacatgggccctatccttgcttttgaaccatccccaagtcctgaaaagagccaaggaagaattagatagtcaagttggaaaggaaagacaagtagaagactctgacattcccaaccttcctctcatccaagctatcatcaaagaaacaatgagactgtatccagccggcccattgatcgaacgacgaactatggaagattgcgaggttgctgggttccacgtaccggctggcacacgtctattagtgaatctatggaagatgcagagagacaaggaagtgtggagtgaagaacctttagagtttagaccagagagattcctaacgagcaacacagaagttgatctcaaaggacaacattatgaactgataccatttggagcaggaagaaggatatgccctggtgtgtcctttgcggtgcagttgatgcatttggtgctcgcacgtcttcttcatgggttcgaaatgacaacaccaatgggtgagaaggttgatatgacagagagtgcaggattaattagtcacaaaatcacaccacttgaagttcttatcaaaccactcagggtctaa

SEQ ID NO: 50 - DNA, 1533 bp, Eschscholzia californica
atggattccttcttgcttgcttattgggttccaatttcagttgcttctattattgcttttgttttcctctacaatctcttttcttcaagaactcttcaaaataagaagattaggacagcacccatggcaacgggtgcttggccgattctcggtcatctccatctctttggttctggtgaattgcctcataaaatgctagctgccatggctgacaagtatggctcagccttcaggatgaagtttggtaaacacacaacactagttgtgagtgatacccgtatcgttaaagaatgtttcactaccaacgataccctcttctctaaccgtccttccactaaagcttttcaactcatgacttacgataatgagtcggttgcctttacaccttacggtycttactggcgtgagattagaaagatatccactcttaaacttctatccaaccatcgtctccaagccatcaaggacgtaagagcctcggaggtaaacgtctgcttcaaaaccttatacgaccagtgtaagaatccaagtggatcagctcctattttgatcgatatgaagaaatggttcgaagaggtgtcgaacaacgtggtgatgagggtaattgtggggagacaaaactttgggtctaagattgtgcaaggtgaggaggaagctatccattacaagaaggtcatggatgagctcttacgtctcgctagcttgtctatgttctcggattttgctcctttacttggtttcgtggacatctttcaaggaaacttgagtgccatgaaacgaaacgccaagaaggtagatgcaatcctggagaactggttggaagagcatcgcaagaagaagaactcagttgctgaaagccagcaagatttcatggatgttatgttgtcgattgttgaggagagcaagttgtctggtcacgatgctgatgccgtaattaaagctacttgtctagccatgatcatgggcggaacagataccacagcagtgagtctaacatggatcatttctttattaatgaataatcgtcacgctttgaagaaagctcgagaagagttagatgcactagtaggaaaggacagacaagttgaagattcggatttgaagaatttagtttacatgaatgctattgttaaggaaacaatgagaatgtacccattaggtactcttctcgaacgtgagactaaggaggattgtgagatcgacgggtttcatgtcaaaggtgggactaggttgctagtgaatgtgtggaagttgcaacgagacccaaatgtatgggttgatccaacagaatttagacccgaaagatttctaacggagaatgcagatatagatgttggaggtcagcattttgagttgctaccatttggagcaggacgaagggtgtgccctggggtgtcgtttgcactacaacttcatgcatttagtacttgctcgcctcatccatggatacgatttgaatactctaaacgaagaaaatgtggatctgacggagagcccagaaggacatgtgaaccacaaagcatcgcctcttga

SEQ ID NO: 51 - DNA, 1605 bp, Glaucium flavum
atggagtttctctctctacaacttcaaccagtttccatttttgctcttcttgttgcctccattttcctctacaatttcttaattcacggaaaaaaatccaacaacaagaagaccacaaaaccaccagcaccagaagcatcaggtggatggccaattatgggtcatctccatctcttcaatgaaaacgagttaactcaccgaacactcggttccatggctgacaaatacggtccagctttcaacatccgattcggttctcatcctacactcgttgttagcagttgggacatcgttaaagaatgtttcacaacaaacgaccgattcttctcgaatcggcctggttcgttagcgattaaactcatgttctacgatgccgattcagtcggttatgctccctatggtgcttattggagagacttgagaaaaatttcaactctgaagcttctttcgaatcatcgattggaaaccctaaaacatttgagaacttctgaagttgaatcctgttttaaagaactttataatcagtggaggaacaacaaaactggtggtggtggagatggttttgctccggtgaggatggataattggtttggtgatttgacgtttaatgttgtggcgagaattgttgccggaaaaaagaattttgccggtggtgcggcgagtggtgatgccggagctcagagatataaggaagctatggatgaagcgtttaggttgatgacgatttttgcgttttctgatgtggttcccgcgttggggtggttggataaattgagaggtttagttggaggaatgaagcgttgtggggcggaaattgattctatagttgcggggtgggttgatgaacatcggttgaagagaagctctggcaagggaagtgatgctgatcttgaacaggattttattgatgtttgtttggagattatggaacattccacattgcctggtgatgatcctgaagttgtcatcaagtctacttgcctggacatgattttgggtgggagtgacaccacaacagtgaccctaacatgggccctttccttactattgaacaatccccatgtgttgaaaagggctagggaggaattggatacaaatgttggaaaggatagacaagtagacgactcagatatccctaatcttgtatacatccaagcgatcatcaaagagactatgagattatacccagctggaccactgatcgagcggaggacatcagaggattgtgaggtaggtgggttccatgtaccagctggtacacgcttattggtaaacttatggaagatgcaaagggacgggagtgtgtataaggaggatcctttggagtttagcccggagagattcctgactagcaacgcagatgtagatttaaagggacagaattatgaattgataccatttggggcaggtaggaggatatgtccaggtgtgtcatttgcagtccaattgatgcatttggtgctggctcgcctcattcatggcttcgaaatgaagacgcctgaaggtggaaaggttgacatgacagaaagtgcaggactaattagtcacaaggtgacgcctttggaagttctgctcaaaccacgtctagcaatccaacattcatag

SEQ ID NO: 52 - DNA, 1686 bp, Glaucium flavum
atgcatgcgaaactgaccttgattaagaaaatggagttcaccatcatcaactctctagaaatccaaccaataatctccactttcgctcttcttactttctccattcttctctacaaaattctcttgaaccatggaagagaaaacaagaacaataaaccaaaaacatcatcatcatcatcatcaataccagaagtagcaggtgcatggccgataatgggtcatctccatctcttcaacggagacgagttaatgcaccataaactcggttccatggccgaaaaatatggtcaagctttctatatccgatttggttctcataaagcggttgtggttagcaattgggagatggttaaaacatgtttcactacaaataaccaaatcttcttaaataggcctcccatgttagctattaacctcttgtttttccccaccgattcgcttagttacataccgtatggtgaccactggagagagttgagaaaattttcaaaccaaaaacttctttccaatcaccgcatcgaaacccagaaaaatttgagaaaattagaagttgattactgttttaaacagctttgtaatcagtcttctaagtattttataattaacaacatggacgaccaagacagcaagtttgctctagtgaggatggatacttggtttgatgatgtgacattgaatgttctggcaagaattattgccgggaaaaagaagtttatatccggcggagcaacgagtagtggtgatgatgataatgctgaagctcggagatacatggaagctttagatgaaggacttcgtctgatgacgagtttcactttctccgatgtgcttccgtggttggggtggttggataatttgagaggtttggctggaaagatgaagcgttgtggtgcagaacttgattcggtttttgcggggtgggttgaagaacatcgtgtgaagagaggctctagaaaggatggtgatgatgctgatcttgaacaggattttattgatctttgctgggagagtttggaacaggtgcctggaaatgatcctgcaaaaatcatcaagttaatttgcatggaaatgattttgaacgggagtggcgccacggcagtgaccctaacatggaccgtctctttactattgaacaaccccgacgtgttaaaaagggcaagggaggagttggatacacacgtcggaagtcatcgacaagtggacgaatcagacatccctaatcttgtttacatccaagcaatcatcaaagagggaatgagattgtatccacctggaccattccttgagcgaagtacaactgaagattttgagatagatggggttcatgtaccagctgggactcggttatgggtgaacttatggaagatgcaccgagacgagagcatgtatcaggaaccactcgagtttaaaccagagaggttcttgaatagcaattcagatgtagatctaaagggacagagttaccaattgctaccatttggggcaggtaggaggatatgtcctggcgtgtcgtttgcgttgccgttgatgcatctgacattggctcgtctcattcatggcttcgaaatgaagttgcccgtaggtgttgaaaaggttgacatgacagaaaatggaggtataattaaccggaaggcgacacatttggatgtgctgctcaaaccgcgcctcatcgctcaacaagcttaa

SEQ ID NO: 53 - DNA, 1611 bp, Glaucium flavum
atggatacactttcaattcaatggattgtaccttccatagccacccttcttgccttagttttcctctacaatctcatttttacttccaaaaaaactaccaagactaacaacactaggaaggcaccaatggcatccggcgcatggccggttcttggccacctccatttatttggaaccggtgagctacctcacaaaatgcttgcaacaatggctgaaaactacggtaccgccttcacaatgaagttcggtaaccacactacactagtcgttagcgacactcgcatcgtaaaagaatgtttcactaccaacgacacccttttcgcgaaccgtccgtccaccaaagcattcgatctcatgacttatgccaatgactccgtagccttcacaccttatagcccgtattggcgtgagcttcgaaagatatcgactcttaaacttctctcgaaccatcgtctccaatcgattaaagacgttcgcgtcgcggaggtgaacgtatgttttagaggcttacacgttctatgcaagagtaaaatctatggagctccggttttagttgacatgaaaaaatggtttgaagaggtctcgaacaatatagtcatgagagtgatcgtggggaaacaaaattttgggtctaggattgtgcaaggacaagaggaggctgtctattacaagagtgtcatggacgagcttttacgtctagctagtgtatccgttttatcggattttgcaccgttatttggttggttggatttctttcaaggaaacataagtgctatgaaacgaaatgggaagaaactagatgtgatacttgagagatggatggaggagcatagacaaaagaagataagctcatcgtcgtcgatagccgcgtccggcgccggtgaagatgatgagcaagactttatggatgttatgttgtctatcattgaggagactaagttgtccggtcgcgacgccgataccgttattaaagctacttgcttggccatgatcatgggagggactgacactacagcggtaagcctaacatggatagtctccttattgatgaacaatcgacatgtactgaaaaaggctcgagaagaattggactcactagttggaaaggatagacaagtagaagattcagatttgaagaattttgtatacatgaatgctattgtcaaggaaacgatgcgattgtatccgtttggtgctttgctcgaacgcgacaccaaggaggactgtgaggttggtgggttccatgtcgaagccggcacccgtttactagtaaacgtatggaagttacaacgagaccctaatgtatggaaagatccattagagtttcgaccagaaagatttctggtcgagaacgtcgatatcgacgtcggcggtcaacatttcgaactattgccgttcggggccggtagaagggtgtgccccggcgtgtcgttcgcacttcagttcatgcatttggtactagctcgtctcatacatggatatgaattggaaacactaaatggtgaagatgtggatttaactgagagcacagaaggacatgttaaccataaagcatcccctcttgatctcctcatcacccctcgcctcgactctaaggtctacaattactag

SEQ ID NO: 54 - DNA, 1599 bp, Glaucium flavum
atggatagtacccttgttctccaatgttttgtaggttccatggcagctgtttctgccttggttttcctatacaatctcatatttagctcatcgaaaactaccaagggtaaggttcttaggaaggcacctatggcagccggggcatggccaattcttggtcacctccatttgtttgggtcaggtgagctgcctcacaaaatgttatccaagatggctgagaagtatggccctgcgtttacattgaagttcggtaagcacacgacactagttgtgagtgacacccgcgtcgtaaaagagtgtttcactaccaatgatacacttttcgctaaccggccttcgactaccgcatttgatctcatgacttatgccaatgactctgtagccttcacaccttatagtccttattggcgtgagcttagaaagatatctactctcaagcttctctctaaccaccgtctccaatcgattaaggaaatccgtgtctcggaggtgaacgtatgttttagggagctatttgagatgagcaagagcaaaaccgatggagctgctccggctttggtggatatgaagaaatggttcgaagaggtgtcgaacaatatagtcatgagggtaatcgttggaagacaaaattttgggtctaagattgtgcaaggtgatgcggaggctgtcaactacaagaatgtcatggatgagctcctacgtctcgctagtttgtctatgttatcggatttcgctcctttacttggttgggtggatatgttccaaggaaacaagaacgcaatgaaacgaaatgccaagaaagttgacaccatactagaaggctggttggaggagcataggaagaagaacaagaagatgagctcatcagaaaatgatgaacaagacttcatggatgttatgctttcgattattgaagagaccaagttatctggccgtgacgctgataccgttattaaagctactgtcttggccatgataatgggtggaacagacaccacggcggttagtctaacatggattgtctccttattgatgaacaatcgtcatgtattgaagaaggctagagaggaaatagacgccattgttgggaaggatagacaagtagaagattcagatttgaagaactttgtatacatgaacgctatcgtcaaggaaacgatgcgattgtatccacttggtgctatgctcgaacgcgacaccaaggaggactgtgaggttggtgggttccaagtacaagccggcacacgattactagtaaacgtatggaagttacaacgagacccaaatgtttggagtgatccatcagagtttagaccagagagatttttatcggagaacgctgatatagacgtcggcggtcaacatttcgaattactaccatttggtgcaggtagaagggtgtgtcccagggtgtcgttcgcgctccaattcatgcatttggtactggctcgtcttatccatggatatgaattgggaactcaaaatgatgagcttgtggacttaactgagagcacagaaggtcatgttaaccatatggcttcccctctagatctcatcctcaccccacgcctcagcaaccctaagctctatgattattag

SEQ ID NO: 55 - DNA, 1557 bp, Glaucium flavum
atgttctttacttcatcttcaaaaaccacaaacaaaaacacaagtaagaaaccacccatggctcccggtgcatggccaatactaggtcatcttcatttgtttaaagaaggtgagttacctcaccacatgcttaaatccatggctgataaatacggccccgccttcctcatgaagttcggccaacaccggtccctcgtcgtcagcgactaccgcattgttaaagaatgtttcactaccaatgacaccttattttccaatagaccgtctacaactgcctttgctgtcatgacttacgctacggactccgtcgcgttcaccgaatatagtccttattggcgtgagcttcgaaagatatccactcttaagctactctcgaacaaccgtctccaggcgataaaaaaactccgagaaagcgaagtgaacgtctgtttccgaggtttatatgattcgtggaggaagaataagagtgaacagaatggtgctggtaatagtattgatggtggtaacgaacgagcacgtccggttctcgtcgacatgaaaaaatggttcgaagaggtgtcgaacaacttagtcatgagggtaattgttggtaaacgtaattttgggactaagattgttgaaggggagaaggaggctgttgagtataagaccattatggatgaactcttacgtcttgctagtttgtctttgttatccgattttgcacctatacttcgtttgtttgatcactttcaaggacatattcgtactatgaaacgaaatggcaagaaactagacgtactacttcaacggtggttggaggagcatcggagaaagatgagcacgccggaggaggagcaagatttcatggatgttatgttgtccattgttgatgagagcaagttgtctggtcacgacgctgatacggttattaaagctacttgcctggccatgataatgggtgggacggacacatcggcggtgagtctaacatggatagtctccttattgatgaacaatcgtcatgcactagcaaaggctagagaagaattggacaagcacgtaggtaaagatagacaagtagaagaatcagatttgaagaacttggtttacttgcatgcaatcgttaaagaaacaatgcgattatatccattgggacctcttctcgaacgcgaaacgaagcaggattgcgaggttggaggattcgatatcgccggaggcactcgtatactagtaaacatatggatggtacaaagagatccggccgtctggaacgacgcgacggagtttataccggagcggtttctaacggagaaatcggatgtagatgtttggggtggtagttttgagcttataccatttggagccggccggagggtgtgccccggcgtgtcgtttgctctacaattcttacatttagtattggctcgtcttatacatggatatgaattgaaaacgccaaatgatatgccggtcgacttaacggagagtactgaagggcatgttaaccataaagcatcacctttggatcttcttctcgtccctcgccttagcgacctgaagctctatgattactag

SEQ ID NO: 56 - DNA, 1614 bp, Glaucium flavum
atggattccattcttacaaccgttgttctcctttccatacttctctactttctattctcatggcagctaaacaaatactctgctactaagaagaataccaaatcatcaaaacagctaccaccagaaccggctggttcatggcccgtcattggtcatctccatcttctcgccaaaggatcaaacttgccccatataaatttgggagccatggctgacaagtatggaccaatcttcatgatccgtatcggcttaaatccaacactggtggttagtagttgggaggtagcaagagagatattcacaaccaacgaccaagttttctcctcccgtccaattcaagtatccacgaaacacttgggtttcgacactgctatgtacggtttcgcaccttatggaccatactggcgtgaaatcagcaaattagtgaagcgtgaagttctatccaacactagactagagttcctaaagcctgtttggggctctgagatcaacacatctatcaaagaattgtatgatgtgtgtgtaatgaaaaacaaagaagaaggtggtactggtccaattattgtggaaatgaagcaatggttctcagatttagcattaaacatgtcggttaagttggtagccggtaagagatattttggtgcttctcaactaggaaatgaggaagctgcgaggtggcaaaaggcactgagaaactgctttaggttggtggggctgtttgttgtgtcggacgcaataccatttctaaggtggttggacgtgggtggtcacgaaaaagaaatgaagaatactgctaaagagttggacgatttgttggagggatggctggaagaacataaaatgaaaaagaagttatcattaagtgaagttgaagctgagaagaaggaaagggatcgggttgacttcatggacgttatgctgtccacacttgaacatgaaaaggcatctgactatttcccggctgatactatcaacaaggctacttgcttggctctaatccttggtgggactgatactaccacagttgtttgggtttgggccttggctctactagtgaataacccgaatgtgttaaagaaggcccaagatgagttggatgtccatgtaggtaagaaaagacaagtggatgaatcagacatcaaaaaccttacatatctccaagccataatcaaggaatcaatgcgtctctacccagcagctacattaggtataagagaatcaacagaggattgcactgtagctggctaccacatccctgcagggactagtttgatagtgaattcttggaagattcaacatgacccacaagtatggactgacccatttgaatttcagccggagagatttctcacaggccacatggacgtcgatattagaggtcagagttgcaaattcctcccttttgggtcgggtagaaggtcatgtccagggacatcactcgctcttcaaatggtaaccttgacacttgctcgtttgatccatgggttcgagttcaggactccgtcagaagcacccactgatatgacagagagcgctggactaactaatgttaaggccaccccacttgaagttctagtctcaccgcgccttccttcggagctttatgtttgttaa

SEQ ID NO: 57 - DNA, 1614 bp, Glaucium flavum; identical to SEQ ID NO: 56

SEQ ID NO: 58 - DNA, 1716 bp, Glaucium flavum
atggatttacaaatcttcttccacttccaaggaattgtaggctcattagctttactatcattcttctattatctatggagacttttaactacgacgaagacgagtatttgtaacggtacaacggctgcaccacctgaagtttccggtggttggccgatactgggtcatcttttgcagctagtaggatcgaaacagccgttgttcaaggttcttggagacatggctgataaatatggacctatttttgttgtccggtttgggatgtacccaactcttgttgtgagcagttgggagatggcaaaggagtgcttcagtaccaacgatagagtcctagctactcgtccaactagtgctgctagcaagtaccttacttacaactatgccatgtttgctttcacattttatgggccttattggcgtgagattcgtaagatatcaactatagaattgttgtcccatcgacgtgttgagatgttcaagcatgttccgttcatggaaatcgatacgtgtatagaacaactatatcttctttggatgcagaaccagaaccagaaccagaaccaaccgaacggagatccggttcaggtaaacatgagtaaagtatttgaagaactaactatgaatgcggtgttgaagttagtcgtcggaaaacgccttaccgacgacaaagaaggcgaaaagctgcacaagaccattcaagaattctttaaactgttagaggtatcagttgcatcggatgtttttccattccttgggtggctagatgtggatggacaaaagagaaaaatgaaaagggtagctaaggagatggacataatagctgaaaaatggcttgaagagcaccgccaaaagagaagtagtaagttggaggaggaggaggaggaggaggaggacgacggcggcggcaaaggagacgcggcggcggcagataaggatttcatggacgtgttgttatccttattggaaggagatgaaggtgattctgatcaacccttcatgaactatagtcgcgatacagtcatcaaagccacctctctgaatatactcgtggctgctacagacactacatcacctaccttaacatgggctatctcattactactcaacaacccccatgtcttaagagaggcccaaaatgaactagacatgaaggtaggaagggatagacaagtcgaagagcaagacattgagaacctaatctacctccaagcaatcgtcaaagagacactccgattgtacccagctggtcctctctctatcccccatgaggctattcaagattgtaaacttggcggatatcatgtaagggcaggtacacggttgttgctgaacatatggaagctacatcgcgacccacgcgtgtggtcgaacccacttgaattcaagccagagaggtttttaattctatcggaggaggtgtgtggttgcagtcgtggaacacaaaattttgattttaaaggccaatgttttgagtacataccatttgggtcgggacgaaggatgtgcccaggatacaactttggcatacaaatcattcacatgacactagcacgcctacttcagtcattcgagatgcagcctgcaaaagctaaatcgctaaatgatcaagatgggcctgtcgacatgagagaaggttctggcctaacacttccaaagataaccccattaaaagttctccttacaccacgcctctatggtcagctttataatcattag

SEQ ID NO: 59 - DNA, 3210 bp, Hydrastis canadensis
atggacttctccatgctcttccaatggctattggttactatggctacccttcttttcttgaattctgtttacaatgtttggtataaatcttcaaaaaacactagtattactactacgactagtaaaggaaagaaggcaccagtagctgctggtgcacggccgttcatgggtcaccttcatatgttagtagggggcaagcaattgcctcaccaggcacttggaaagttggccgatatatacgggccagctttcatcattcatattggcccaaacccagaacttgttgtaagtagttgggagcttgcaaaggagtgtttcactactaatgacaagtatttcgctaaccgtcctactaacaaagccatgaagtacttgacatacgacgaagcatccgttggctttggaccttatgggccactctgggttgaaatgcgaaaaatagctaaatctaatcttctctctcaacaaaggctccaaatgcataaacgtgtccgagtcttagaaatagacgcgttttttaaagaactccatgagctatggtcgatgaagaaagaggatggtccagtttctgtagacatgaagcaatggtttgaagaattgacacttaatgttatcaccagaatggtttctggtaaacataaatatgcaactaaggcaagacggggtgatagtgaggcgaagcaattcaaaagagtaataggtgaggcagcacattttacaggaaatcttttgctatcagatatatttccatctcttgggttcttggataacatgcaaggtcgtgtgaattccatgaagcgaacaggcaaggaacttgactccatccttagttcatgggttgaagagcatcgccaaaagaaactatcaggagagcagtcagaggatgaagagaaagactttatcgatcttacgttgtccatgatggacgaaattcagctccactcgactgactcagagaccttcatcaaagctatttgcgtgggtgtgatcctaggtgggagcgacacaacatcagtgggaataacatggatcctttctctactaatgaatcatcgcgatgttttgaagaaggcccaagaagaattggatcaacaagttggaatggacagaaaagtagaggattcagatctgaataatttggtatatctcagggcaatcgtaaaggaatcaatgcgtttgtaccaagttgggccacttattgaacgaaaggcatcacaagattgcaccataggcgggttccatgtcaaagcaggaactcgccttttggtgaacctttccaaggtacacaaagacccaactgtgtggtcagatcctttggaatttcaaccggagagatttcttacgacgcactcaaacatggaccttaagggacagcatttcgaactacttccttttgggtcaggtagacgaatgtgtccagggtacttgtttgccctcaatgaaatgtatttggtgcttgctcgtctcattcaaggctttgaactgggaactcctatggatgcaaaggttgatatgacagaaacatcaagtgttaccaactacagagcaacaccccttcaagtattgctcaccccacgcctcagtcctaagctatacgattattaaatggacttctccatgctcttccaatggctattggttactatggctacccttcttttcttgaattctgtttacaatgtttggtataaatcttcaaaaaacactagtattactactacgactagtaaaggaaagaaggcaccagtagctgctggtgcacggccgttcatgggtcaccttcatatgttagtagggggcaagcaattgcctcaccaggcacttggaaagttggccgatatatacgggccagctttcatcattcatattggcccaaacccagaacttgttgtaagtagttgggagcttgcaaaggagtgtttcactactaatgacaagtatttcgctaaccgtcctactaacaaagccatgaagtacttgacatacgacgaagcatccgttggctttggaccttatgggccactctgggttgaaatgcgaaaaatagctaaatctaatcttctctctcaacaaaggctccaaatgcataaacgtgtccgagtcttagaaatagacgcgttttttaaagaactccatgagctatggtcgatgaagaaagaggatggtccagtttctgtagacatgaagcaatggtttgaagaattgacacttaatgttatcaccagaatggtttctggtaaacataaatatgcaactaaggcaagacggggtgatagtgaggcgaagcaattcaaaagagtaataggtgaggcagcacattttacaggaaatcttttgctatcagatatatttccatctcttgggttcttggataacatgcaaggtcgtgtgaattccatgaagcgaacaggcaaggaacttgactccatccttagttcatgggttgaagagcatcgccaaaagaaactatcaggagagcagtcagaggatgaagagaaagactttatcgatcttacgttgtccatgatggacgaaattcagctccactcgactgactcagagaccttcatcaaagctatttgcgtgggtgtgatcctaggtgggagcgacacaacatcagtgggaataacatggatcctttctctactaatgaatcatcgcgatgttttgaagaaggcccaagaagaattggatcaacaagttggaatggacagaaaagtagaggattcagatctgaataatttggtatatctcagggcaatcgtaaaggaatcaatgcgtttgtaccaagttgggccacttattgaacgaaaggcatcacaagattgcaccataggcgggttccatgtcaaagcaggaactcgccttttggtgaacctttccaaggtacacaaagacccaactgtgtggtcagatcctttggaatttcaaccggagagatttcttacgacgcactcaaacatggaccttaagggacagcatttcgaactacttccttttgggtcaggtagacgaatgtgtccagggtacttgtttgccctcaatgaaatgtatttggtgcttgctcgtctcattcaaggctttgaactgggaactcctatggatgcaaaggttgatatgacagaaacatcaagtgttaccaactacagagcaacaccccttcaagtattgctcaccccacgcctcagtcctaagctatacgattattaa

SEQ ID NO: 60 - DNA, 1587 bp, Hydrastis canadensis
atggcctttgttgctcttattgttgtttacaatatctggtttaaatctgcagcaagcagaaataagaccagctataataacaaaacaatgagcaagacaccagtagttgatggtgcgaagcccatcattggtcacctccatttgttaatgggaggtgacctgcctcatcatgcgctcggaagattagccgataagtatgggccaatcttccttatgcacattggcgcattcccagaactcgttgtgagtagctcggaactcgcaaaagagtgtttcactaccaatgataaatatattatcaaccgtcctaccaataaggccatgacgtatttgagttacgaacaagcatctgttggttttgcaccttatgggccactttggattgagatgagaaagatctctaaatccaatcttctctctaaccaaaggattcacatgcagaagcaagtacgagtggcagaactggacgcgttctttaaagaactgtaccagctgtgtcgttcaaacgatgaaaacaacaacaacagtactagtcatggtaaagttttggtggagatgaataaatggtttgaagaactgacactcaatgtagtgactagaatgatatgtggtaaacaaaaaatgggtactaaggcaaggcttggggatagcgatgcgaagcattacaaaaaaaccattgatgaggcagcacattttatgggaaaccttgtgatctcagacgtagttccatgtctaggaatgttggacaatttactaggtcatgtgagcgccatgaagcgcacaggcaaggaacttgacacaatctttggttcatgggttgaagaacatcaacaaaagatcagactctctggttataaagatgatgctgaagaggaggagcatgactttattgatcttacattgtccatgatgaagggatcaactgacctccatggtcttgaccctgcaactttcatcaaatctatatgtgtgggtatgatccttggcggcacggacacgacatcggtggccttaacatggatcctctctctactactaaataatcgccatattttgaagaaggcccaagaagaattggaccatcaagtaggaaaagagagaaaggttgaagattcagatctcaacaatctggtctttataggagccattgtgaaagaatcaatgcgtttatacccagttgggcctcttattgaacgtgaggcaatagaagattgtcagattggtggtgtccatgttaaagccggcacgcgattactaataaacatttggaaggttcaacaagatcctaaaatttggcctaatccttcagagtttcgaccagaaaggtttctggattctaacatggatgttaagggccagcatttcgaactcattccttttgggtccggtaggcgaatgtgtccaggaatgtcgttcgccattaatgaattgaatttggtgcttgctcgtcttcttcaaggcttcgagttggaaactccaatgaatgcaaaggtagacatgactgaaacttcaagcgttacgaattataagggaacccctctccaagtacttctcaccccacgtctcagttctaagttatatatgtaa

SEQ ID NO: 61 - DNA, 1596 bp, Hydrastis canadensis
atggagtattcccatcttctcccatggctagcaacttcaatagctgccatttttgctttcatttttctcttttatgtccggaggaggaaaaacaacaaagcctttattcataatcatgccaaaaaagcacctgtggtaccgggtgctttgccgtttcttggtcacctccgcctatttactggaccgattttacctcacaaagcgcttggagcacttgcggataagtacggtccggctttcactatctatctgggaagtcatcaaacacttgtggtcagtggtcgagagttggtaaaagaatgcttcactactaatgatagattgttctctaatagacccagaagtaaggctgtcaagtacttgacttatgatgaagcctcagttggttttgcaccttatggcccactttgggttgagatgcgaaaggtttcaaaactcaattttctttctaatcaacggatccagatgcagaaacaggcactagcctcagaattgaatttttgcttcaaggatgtgtatcaattgtggttgaaaaataaggaactccccgttatggttgatatgaccaaatggtttgaagaaatgacgttaaatgtgataacaagattgatttgtgggaaacaaaactatggatctaaggctaacagtggtgaaagtgaggccaaaaggtataaacaagttgtagaaaaggcagcacatcttacatcaactgttgtgatgtcagatgtgtttccttttcttgaatggtttgataagtttcaaggacaggagaaagtcatgaaaaaagtagctaatgaatttgattcaatccttggttcatgggtcgacgaacatcgtcgaaagagacttcttcgaggcaacaatgaggaggaggaggaagagcaggacttcattgatctttccttggccatgatggaggaaactcagcttcatggtgttgatcctgataccttcatcaagtcaatgtgtttgggcatgatccttggaggaggtgacactacgccggtggccctaacatgggccctttcgctactattgaataacccagatattatgaagaaagcccaagaagaaatagaccaagtcataggaaaagagagaaaattagacgggtcggatataagtaatctggtctacctccaagccgttgtgaaagaatcaatgcggttataccaagttgggccattgattgaacgcgaaacaactgaggattgtaagattggtgacttccatgttgaagcaggcacgcgtttactagtaaacatttggaaagtacaacaagatccatgtgtgtggtcgaaccctacggagtttcaaccggagagatttctttctagtaagtcagatatggatcttaagggtcagcattttgaactaattccttttgggtcaggtagacgaatgtgtccagcagttgcttcagctctccaaatgatgcatttggtgcttgcaaaactcattcatggctttgaattaggaactcccatgaatgcaaaaatcgacatgacagaaacttcaagtataaccaacaacatggcaactcatcttcaagtgctactcaacccacgtttaaatgctaatctttatgatttttag

SEQ ID NO: 62 - DNA, 1632 bp, Hydrastis canadensis
atggcggatttcaccatgctcctccaatggttattgcttaccatggctacccttcttttcttgaatgctgtttacaaaagtattaaatcttcaaaaaacactattaatgataccagttttaaaaaaggaaagaaggcaccagtagctgctggtgcaagaccctttattggtcacctccatatgttagtaggaggcaaacaactacctcatcaagctctcgggaagttggccgataagtatgggcctgccttcatcatcaatattggtccaaacccagagcttgtcgtaagtagttgggagcttgcaaaggagtgtttcactataaacgatcggtgtttcactgatcgtcccagtaacaaagccatgaagtacttgacctacgacgaagcctctgttgggtttgcaccttatggccctctctgggttgaaatgcgcaagattgctaaatccaattgcgcatttcaacaaaggctccaagtacagaaacgtgtacgtgtcttagaaattgacttattttttaaagagctccacgagctatggtcccacgctggtgctggtgctaccggtactagtgtaattcctctttccatagacatgaagaaatggttcgaggaattgacactaaacgtgatcaccaggatggtgtctggaaaacataattatgcaactaaggcaagaaagggtgatactgaggcgaagcgattcaaaagagtgataagtgaggcagcacattttacaggaagacttctgctctcagatatatttccatcacttgggttcttggataacatgcaaggtcgtgtgaactccatgaagcgaacaggcaaggaacttgattcggtccttagttcctgggtggaagaacatcgccaaaagagagtctctggaaataaagagcagtcacctgaggatgatgatgtggaacaagattttatcgatctcacgttgtccatgatggaggaaattcagcttcactggactgacgctgacaccttcatcaaagctatctgcgtgggtgtgatccttggggggagcgacacgacatccgtgggcataacatggattctttctctgctaatgaatcatcccgatgttttgaaaaaggccagagaagaattggaccaacaggtaggactggaaagaaaagtggacgattcagatctcaataatctggcctatctcagagccattgtaaaggaatcaatgcgtttgtaccaagttggcccactgattgaacgtaaggcaaaacaagattgcaacataggtgggttccatctcaaagcaggcacacgcctacttgtgaacctttccaaggtgcacaaagacccgactgtgtggtctgatcctaatgagtttcgccccgagagatttttcaccacccacaccaacatagatatcaaggggcagaattttgaactcattccttttgggtctggcagacgtatgtgcccagggtacttatttgctcttagtgaaatatatttggtgcttgctcgtctcattcatggcttcgaattgagaactcccaatgatgccaagcttgatatgacagaaacttccagtgttaccaattacagggcaacacctctccaagtactactcactccgcgcctcagttctaagctctactga

SEQ ID NO: 63 - DNA, 1599 bp, Hydrastis canadensis
atggactacttttccatgccttaccaatggttactaacttccttagctactcttattgtctttgtttttatctggtctattactgctggaaaaacaagtactacttctaacaaagcgaaaaaggcaccgccaatagcggctggtgcatggcccattatcggtcacctccatttgataatggggggtgaactccctcatcgattgctttcgaatttagccgataaatatggcccaatcttcatgctcaactatggttcacaacctggattagttgtgagtagcttgaagcttgctaaggaatgttttgttcataatgatagagctgtttttaaacgtcctaatagcaaagccatgaagtatttcacttatgatcaagcttcatttggttttgcaccttatggaccactttgggttgaaatgagaaaagtgtctaaatcaaatcttctttctaaccaaaggcttcaattacaaaggaatcaacgtgcctcagaagttgatgcttttataaaagagctttaccaactatgtaagaagtccaacaatggtactcttatggtagaaatgaataaatggtttgaagaattgacacttaacgttgtgactagaatggtttgtgggaaaaaaaacattggggctaaagcaaggcatggtggtgataatgaggcaaaatattataagaaagttatagatgaagcaacaatatttacagctaaattggtggcttcagatttttttccttctcttggatgggtagattatttgcatggtgatgagagtgctataaagcagacagccaaagaacttgattccatcattggttcctgggtggaagagcatcgtcaaaagagactactctcgctcaataaagacgactacgcagagcaggattttatcgatattacgttgtccatgatcgaccaaactcagcaccagggtattgatgctgataccttcgtcaagtctatgtgtgtgggtatgatctttggtgggagtgacagcacatcggtggccctaaattgggctctttcaatactaatgaataatcgacatgttttaaagagggcccgagaagaaatcgacacacttgtagggaaggacagaaaagtgaacgatgtggatgttactaaattggtttatctcaaagccattgtaaaagaatcaatgcgtttatgcctagttggaccgcttcttgaacgtgtgaccgtagaagattgcgagataggtggtttttatgtcaaagcaggctcgcgcatagtggtaaacatatggaagttgcaacatgacccagacctgtggtctgatgatgttatggaatttcgaccagagagatttctcacaaccaactcaaatgtggaacttaggggtcaacattttgaactcattccttttgggtctggtagtcgaatgtgcccaggtgtaacattcgcactcgaactcatgcacttgacacttgctcgtctcattcatggatttgaacttggtacccctatggatgcaaaggttgacatgacagaaacttcaagtgttaccaattacaaggccacaccccttgaaatccttctcaccccacgccttcatcctaagctttatgatttttag

SEQ ID NO: 64 - DNA, 1605 bp, Hydrastis canadensis
atgtttatatcgatcactcaacaatccatggattcatttcaccaatatctagcaactataatttttggtgtcttttcctttgtattattcttgatctattatctaccattgaagagaagtagaagtgataaaaagagagctgctcccaaaccggtcggggcatggcctatcataggtcacttgcctatgttatcccggcaccaaccaccgcacataacgttgggaaatattgctgataagtacggaccagctttcactcttcagcttggcgtgcatcgagcattggtggtgagtagttcagaggttgccaaggagtgtttcactaccaatgacaaggccttagcttcccgcccaagctctgtggctttaaagctaatgggttataacaatgctatgtttggcttcggcccttatggttcatattggcgacaaatgcgcaaaatagttgtacttgagcttctctcaaaccatcggctccaattgctaaaacacgttcgtatatctgaggttagcacatctttaaaagaattgtaccaggtttgggcatcatgtactaataagaacgacaaaggacaagttttggtggatatgcagcaatggtttggtgacttgacactaaacgtctccgttaggatgattgctgggaagcgatactttggtgccagtgcagcatgcgacgaagatgaagcgaggaggtttcagaaggcgattaaagatttcctccatttagtaggcttgtttgtggtgtcagacgcgcttccctttctagaatggctagatattcagggtcatcagaaagccatgaagagaactttcaaagaattagatagaatacttgggaaatgggtggaagaacatcgacgaaataaattagacggtggaacgaatgtgggacgagacttcatggatgtgatgtcttcgatacttgacgatgcaaatatctctgattatgatgctgataccattaacaaggctacttgcctgagtctgatcttgggtgggactgacaccacaatggtcactctaacatgggctttatccttattaatgaacaatcaacacatattgaagaaggcccaagatgaaattgacatctatgttgggaaagataaaaacgttgatgaatcagatatagagaaactggtgtacctccaagccattgttaaggaaacattgcgtttgtacccagccggtccactatctgggccacatgaggccatagaggactgcactgtagctggttatcatgtaccaagaggcacacgcttgataacaaatctctggaagattcaacgagatccacggatatggtcgagcccttgtgagttccaaccagagagatttctcaccactcaagcaaatgtggatgttaggggccagcattttgagtttcttccattcgggtctggaagacgttcgtgccctgcgacctcatttgcacttcaagttgtgcacttagcattagcacgtgtattacaaggcttcgagtttgaaactcaatcaaatgcacctgtggatatgaccgagagcgcgggacttacaaatgtcaaagccaccccgcttgaagttctaatcaccccgcgcctccctttgaatctatattaa

SEQ ID NO: 65 - DNA, 1590 bp, Hydrastis canadensis
atggagtcgcttcaccaatatctagcagcagtcatgagttgtatctttgccttgttactcttcctctattatttcccatggaagatcagaagaagtagctctgataataacatgagaagtgcacctgaagcagctggtgcatggcctatcataggtcacttgcccatgctgggagggcaccaactaccccacataacgttgggaaacttggccgataggtacggaccagccttcactatccggcttggtgtatgccgggcactggtggtaagtagttcagaggtcgcaaaggagtgtttcactaccaatgacaaggcctttgccacccgcccaagctctgtggccgtaaagctaatgggctataactatgcactctttggcttagccccttatacttcttattggcgtgaagtgcgcaaaatagtaatactggagcttctctccaatcgtcggctagagttgctaaaacatgttcggatctctgaggtcaacacatctataaaagaattgttccaagtttgggcatcatcaaataataagaatgagaaaggacaagttttggtagagatgcagcgatggtttggtgacttgacaataaacgtagctgttaggatggttgctgggaaacgatacttcggtgctagtgttaatacgtgcgatgatgaggaggaggcgaggaggtttcaaaaggcgattaaaaatttctttcatcttgtagggttgtatgtgttatcggattctcttccatttttggagtggttggactttgagggtcatcaaaaggctatgaaaagaactttcaaagatgtggactgtatacttcaaagatggttggaagaacatcgacgagataaagagaatggtgcaatgaaggaggagcgagacttcatggatgtgatgttgtcgatccttaaagatgcaaatctctttggttacgaagctgatactgttaacaaggccactagtctgaatataatattgggtgcaacagacactacaatggttactctaacatgggccctatcgttattattgaacaatcgacacatattaaagaaggctgaagatgaaattgacatccatgttgggaaagataaagctgttgatgaatcagatatagagaaactagtatatctccaagccattgttaaggaaacattacgtctgtacccagttgctccactgttagcagcacatgaagccatagaagactgcattgtagctggttatcatgtaccaagaggcacacgcttgataccaaatatttggaagattcaacgagatccacgcatatggtctagtccttgtgatttccaaccagagagattcctcacaacccaagcaaatgtggacgttaggggtcagcatttcgagttgtttccttttgggtctgggagaagaatgtgcccagggatctcatttgggcttcaagtagtgcacttggcactagcgcgtgtattacaaggcttcgagtttgatactccatcaaataaagctatagatatgactgaaagcgcaggacttaccaacctcaaggccacccctcttcaagttctaatcaccccgtgcctccctttgaatctgtattaa

SEQ ID NO: 66 - DNA, 1593 bp, Hydrastis canadensis
atggattcaattttactaccaactccattaatggtcagtctctttgccttactattatgtctttactatttaatcatatcgaggccaaggtctagtcataatactagtactaaggaggcacccgaagccgctggagcattgcctattatcgggcacctccatttgttaggtgggcgaatattgcctcacataacattaggagccatggctgataaacatggaccagccttcatgattcgcattggtgtacatagagcattggtggtaagttcttcagaagttgcaaaggagtgtttcacaaccaatgacaaggctttcgcttctcgtcctaagcatacagcagcggaactcatgggttataattatgccatgtttggatttgcaccttacggtcctttttggagcgaaatgcgcaagataatcatggctgaactcctctccaatcgtcggcttgagttgcttaaatacatccgggatttcgaattaaaagcatctatcaaagaactatacatgacatgggagaaccacagtgttactaataaaggtcaggtagtagtagaaatgaagaaatggtttggagacttaactctaaatgtgattctaaggatgattgctgggaaaagatactttggttcaaattctacttgtgatgaaagtgaagcaaagatatgtcaaaagggtatgagagatttctttaggttattgggagagttccttgttgaggatgcaattccttatttggggtggttggacttgcaaggttttaaaaaagagatgaagaatacagctaaagaacttgatattcttcttcaaggatggttggaagagcacaaaaaaaagagggagttctctaaggatgttaaggaagagcaagacttcatggacgtgatgatgaccatacttgaagatgcaaacttctctgattttgatgctgatactatcaataaggctacgtgtttgactataatctcaggaggaagcgacactacaatgcttactctaacatgggccctatccttactactgaacaatcaacatgtgttgaagaaggcccaagatgagttggacacccacgtcggtagggatagacgcgtggacgaatcagacatcaagaacctcgtctaccttaacgccatagtgaaggaaacattgcgcttatacccagctagtccactactgggtattcgggtgtccacagaagactgcactgtagctgggtaccatgtcccatcagggacccgtttaatggtaaatgcttggaagattcaacgagacccgttagtgtggtccgacccatttgaatttcgcccagaaagatttctcacaacccatgtaaatgtggatgttaagggtcaaaattttaatttaatcccatttgcatcaggtagacgtgtgtgcccaggagttgcatttgcccttcaaatgctgccactagttctagctcatttgctacatgggttcaaactcatgactcagttgggtggacctgtcgatatgactgaatccactgggttaactaatatcaaagcaactccattggaagtagttatcagcccacgtcttcgtccagaactgtatgaaatgtacacatag

SEQ ID NO: 67 - DNA, 1578 bp, Hydrastis canadensis
atggagtcgcttcaccaatatctagcaacaattttgagttgtatctttgcctttttactcttcctctattatttcccatggaagggaagaagaagctttgataataacttaagaactgcacctgaagcagctggcgcatggcctatcataggccacttgcctatgttaaaccaacgtgatttaccccacgtaacgttgggaaacttggcggataggtacgggccagccttcactatccggcttggtgtacgccgagcactggtggtgagtagttcagaggtcgcaaaggagtgtttcactaccaatgacaaggcctttgccacccgcccaagctctgtggctgtaaagctaatggcctataactatgcagtctttggctttggcccttatggttcttattggcgtgaaatgcgcaaaatagtaatacttgagcttctctctaatcgtcggctagagttgctaaaacatgttcggatctctgaggtcaacacatctataaaagaattgtaccaagtttgggcatcaaataataagaatgagaaaggacaagttttggtggagatgcaacgatggtttggtgacttgacaatgaacgtagttgttaggatggttgctgggaaacgatacttcggtgctagtgttacgtgcgatgaggaggaagcgagaaggtttcaaaaggcgattagagattttagtcatcttgctggtttgtatgtgttgtcggatgctcttccaaatatagagtggttggactttgagggtcatcacaaggccatgaaaaaaactttcaaagatttggactgtatacttcagagatggttggaagaacatcgacgagatagagagaatggtgcaacgaagggagagcgagacttcatggatgtgatgttgtcgattcttaaagatgcaaatccttttgatttcgaggctgataccgttaacaaggctactagcctgaatatggttttgggcggaacagagactacaactgttactctaacatgggccctatcgttactattaaacaaccaacacatattgaagaaggcgcaagatgaaattaacatccgtgttgggaaagacaaacctgttgatgaatcagatatagagaaattggtgtacctccaagccattgtcaaggaaacattgcggttgtaccctgtccttccattatccgtaccccacgaggccatagaagactgcaccattgctggttatcatgtaccaagaggcacacgcttgataacaaatctatggaagattcaacgagatccacacatatggtctagtccttgtgagttccaaccagagagattcctcacaacccaagcaaatgtggacgttaggggtcagcatttcgagttgtttccttttgggtctgggagaagaatgtgcccagggatctcatttgggcttcaagtagtgcacttggcactagcgcgtgtattacaaggcttcgagtttgaaactccatcaaatgtacctatggatatgactgaaagcgcaggacttacgaatttcaaaacaacccctcttgaagttctaatcaccccatgcctccctttggaccaatattaa

SEQ ID NO: 68 - DNA, 1578 bp, Hydrastis canadensis
atggattctcttctccagttacaaataattggagcacttgctgccttaatattcacttacaaactattgaaagtgatatgtagaagtcccatgactgatggcatggaagccccggaacctccgggagcttggccgattatcggacacctccatctgctcggtggccaagacccaatagcccgtacacttggagtcatgactgataaatatgggccaattttaaaactccggcttggtgtacatactgggcttgttgttagtaattgggaactggcaaaggagtgtttcactacaaatgacagagttttagcttcacgtcctatgggtgcagcaggaaagtacttgggctataattatgcgatatttgggctcgcgccgcatggaccatattggagtgaagtacgtaagatagtattacgtgaacttctctctaatcagagtttagagaagcttaaacatgttcgaatctccgagattaatacatgcttaaagaatttattttcattgaacaatgggaatactccaataaaagttgacatgaagcaatggtttgaacgcccaatgttcaatgtggtcactatgatgattgcagggaaacgatattttagtatggagaatgacaatgaggcaatgaatttcaggaaagttgccactgaatttatgtacttaactggggtgtttgtagtgtcggatgcccttccatatctggagtggttggatttgcaaggacatgtgagcgccatgaaacgcacggccaaggaattggacatccatgttgggaagtggcttgaggagcatcgtcgtgctaagcttctgggtgaaactaaaaatgaagatgattttgttgatgtgctgctaaccatcttgccagaggacttgaaggataatcaaacgtatatacatgaccgcgataccatcatcaaggcaactgcactggctctttttttagctgcctcagatactacagctatcaccttgacatgggctctatcgttgatactcaacaatccggacgtcttgaaaagagcacaagatgagttggacaaacacgtcggtaaagaaaaactcgtcaaagaatcagacatcataaatctagtgtacctccaagctatcatcaaggaaaccttacgcctgtatccagctgcacccctcttattgccacatgaagccatggaagattgtacggtaggtggctatcatgttccaaaagggactcgaatttttgttaacatatggaagttgcagcgtgatccgcgtgtatggtttgatcctaacgagtttcgaccagaacgattcttaaccactcatgcaaatgttgattttaagggacagcattttgagtacatacctttcagctctggtagaagggtatgcccagggatcacatttagtacccaaatcatgcacttaacacttgcccatctacttcatgaattcaacatagtgacccctacgaaatcaaatgcaggggttgacatgactgagagcttaggcatcacaatgcctaaagcaactccactagaagtacttctcactccacgtcttccatctaatctgtacaatcaatacagagactaa

SEQ ID NO: 69 - DNA, 1566 bp, Jeffersonia diphylla
atggattcacttcaactcatagctagtgttgtgtgtggattgtttgccttccttcgtatctactacttactaaagaagttgtctagtaacaaggaggcaccccaactcggtggagcatggccgattatcggccacttacatctattaggccgagttgagctcccccacatattttttagtgccatggcagacaagtacggtccagccttcatgattcagcttggtatgcgacgagcactagtagtgagcagtgcggagattgccaaagaatgtttaactacaaatgataaggccttagccactcgtccaagttcaatagcagctgagattatgggttatgactatgctatgttcgggttaggtccatacggggactattggcgtgaagtgcgcaaaatagtggtcttggagtttctctctaatcgtcggcttgagttgctaaaacatgttagggtgtctgaaatatccctgtctctgaaagagttgtaccaatcctgggaaaaacaaaacaaagctgatgaaccagttttagttcatctggaccaatggtttggcgatatgacgctcaatctttcagttagaatggttgctgggaaaaggtactttggtgcaactgctgcttgtggtgaagatgagtctaggaaagttcaaaaggcaacaagggaattcgataggcttttgggtctgtttgtagtgtcggattatcttccttttctgcggtggctggacttggaaggtcaccagaagttgatgaagagcataggtagagaacttgattctattctgcagggatggttggatgagcataaaactaggaggaactctggtggaggagctaagggagatcaggatttcatagacgtaatgctttccgtccttgaagatggaaacctttccaattacgatgctgataagctcaacaaggctacatcacttacgatgattgtagctggaagcgaaactacaatggtcactctaacgtgggctgtctgcttgttgctaaacaatccggaagtgttaaacaaagctcaagatgagttggacatgcacattggcaaggacagacaagtggaagaatcagacatcaagaacctggcatacctccaagctgttatcaaagaaacgatgcgtttgtacccagttgctccactattaattccccatgaagccatggaagactgcaccatagctgggtatcatgttcgagcaggcacacgagttatactaaatggttggaagcttcaacgagacccatttatttggtctgacccttgtgagttccaacctgaaagatttctcaacaacgatgtggatgtgagaggtcggcattttgagttattgccatttgggtcaggtagacgtgcatgccctgggatttcattggcccttaatgtggtgtctttgacattggctcgtttgttacatgagttcaagttttcgaatccttcagaaggcaaggttgatatgtctgagagtgcaggggtggttgttgccaaggcaacacctctggaagtacttatcattccacgcctaccttcaaagttttacgagtactataagctatag

SEQ ID NO: 70 - DNA, 1557 bp, Jeffersonia diphylla
atgttttctcttcagttgctatcaactccattgtttggcttctttaccctgctggccatttactatctcttatggactaagagtaacaaaaccaaggaagcacctcaacctgctggagcatggccaataatcggccacctccatctactagccaggagtgaactcccccatataactttgggagccatggccgataagtacggtccagctttcatgatccgccttggtacacgccaagcaattgtagtgagtaattcagagattgcaaaggagtgcttgaccatcaaagataggatcttcgctactcgtccaagcttagtagcatttaagctcatgggctacaactctgccatggtcgggttaagcccttatggaccttattggcgggagttgcgtaagataatcgcgttaaaagtcctctcacaacgtaggctggagtctctaaaggatgtgtgggactcagaaatatcctcatccttaaaccacttgcaccaaatatggtcacaccaaaccgaacccaatggaaagattttagttgaaatggatcaatggtttggtgatctaacactaaatgtggcagttaagatggttgcagggaagagattctttagtgctgatgctgcttgtgatgaaaatgagtctagaaggtgtcaaaaggcaataagagagttctttaggcttttgggtcaatttgtagtatcagattctcttccatttctagggtggttggacttggaaggttatcagaaagagatgaagagtacagccaaggaagttgattcaatacttcagaaatggttggatgaacataaacagaaaagacaatctgcaggagctgatagagatcaggatttcatggacgtgatgctttctctcctagaagatgcaagcctctcccaatatgacactgataccatcaacaaggctacctgcttttcaatgatcgtaggtggaagtgatactacgaagatcacactgacatgggctctcaccttactactaaataatccagatgtaatgaaaaagagccaagacgagttggatatccaggttggaaaagataggcatgtcgaagaatcagatatcaagaatctagtatacctggaagctatagtgaaggaaactttgcgtttgtatccagctgctccactattagctccccacgaggccacagaagattgtattgtagctgggtataatgttcgcgcaggcacacgcttaatagtgaacgcttggaagattcaacgagaccccttgatttggccgaacccttctgagtttctaccagagagatatcttaacaaagatgtcgacgttaaaggacaacattttgaattaatcccatttgggtcaggtagacgtgcttgccctggaatcacatttggacttcaagtggtatccttgaccttggctcgtctcctccatgagtttgagatttccattgcatcaggaattaaagtggatatgacggagagcggaggtctagttactgccaaggccacccctttgaaagcacttatcgccccacgctttctttattctcatcatcacatttag

SEQ ID NO: 71 - DNA, 1578 bp, Mahonia aquifolium
atgaattcacttcagttcctagcaactccattgcttactctcattgcattactatgtgtttactgcatagtatggagaaaatcattctctagaaacggaagcaaaataaagcaggcgccctgggcaggtggagcatggccgatcatgggtcacctgcatctactagcctggggtgacctcccgcatataacgttgggagccttggccgataagtacggcccagtcttcatgatgcagcttggcatgcgccaagcaatagttgtaagcagtgcagagattgcaagagagtgtttcaccactaatgataggatcttagcaactcgcccaagctctatagcagttaagctcatggcctacaactacgccatgtttgcatttgccccgtatgggcctaattggcgtgaaatacgcaagacagtcatgcttgagctcctctccacccctcgcctcgagtcactcaagcatgtctgggaggatgaaatatccacgagtgtcaaagagttgtatgaattatgtgccagcaaaaccaaaacccatggccatgtttcagtagacatgaagcaacggtttggtgatctgacactcaatgtgttagtgaagttggttaatgggaagagatactttggtgcaaatactgattatactgaacatgaatcaaggaggtgccagaaggcagtgagggattttttcagtcttatggggttgtttgtggtatcagattttcttccatttcttgagcggttggacttgcagggttatgagaaagagatgaaaagggtagctagagaagttgatggtatagttcaagggtggttggacgagcataaaaggaagcgagagtccagtgaaaccacccacgatcaggacttcatggacgtgatgctttcgatacttaaagactcaaaattctctaactctgattatgatgccgataccatcaacaaggctacatgttttaacatgatcttaggtggaagtgacacaacaatgagcacaatgacctgggctttatcggcactgctaaataatccacatatgttgaagaaggcccaagatgagttggaattccatgtcggaaagggtagacaggtggaggaatcggacatcaagaagctaacatacctacaagctataatcaaagaaactttgcgtttatacccgtcggctcccctgttagctccacgtgaagccacagaagactgcaaaatagcggggtatcatgttccagcaggcacacgcctaatcgtgaatgtctggaagattcatagagacccatttgtttggcccaaccctaacgagttccaacctgaaagattcctaaataaagatgtggatgttaagggtcagcatttcgaattgatcccatttgggtcagggagacgtgcttgccctggggtatcattaggacttcaagtggtgtcactgggcttggcgcgcctcctacacggatttgagctttcgatcccatctggaagcaaggtagacatgactgaaactgcaagtctagttactttcaaggcaacgcctctggaagtatttatcactccacgcctatctccacatatgtatgtggagtag

SEQ ID NO: 72 - DNA, 1511 bp, Mahonia aquifolium
cttatgcatggaagaggaaaaaccatacaaaggatagcaaaatcaaagagccaccccaaccagccggagcatggccgataatcggccaccttcatctaatatcccgcggcggcctcccccatataaacatgggggccatggcggacaagtacggtccagttttcatgatccggctaggagtaaatcgagccgtgattgtgagtaactcggagatcgtaaaagagtgcttcacaacaaacgataaattcctactaaaccgtccagttgggttggccttaaacctcatgagttacaacaacgccatgttcgggttctctcggtacggtccatattggcgtgagatacacaaaatagtcatgcttgagctcctctcgagcagccggctcgagtccctgaagcacgtatgggactcggaaatattgacatccatcgaagagttgtaccaattatgtcaaacacaaaacaaggctcatgaaggcccagttttggttgaaatgaaggattggtttgcagatatggcactcaatgtgtcctttagaatggttgctgggaaaagatactttggtgcaagtgctggtggtaataaagatgaggcaagaaggtgtcaaaagaccatgagagatttctttagacttgttggcttgtttatagtgtctgatgcacttccatttcttaggtggctagacttgggagggcatcagaaggagatgaagagaacatttgaagatcttgactatgtgcttcaaggatggttggatgagcataaattgaatagaaaatctggtgggaatggtgatcaagatttcatggatgtgatgttatctactctttatgattcaaaatttaccgattacgacgttgacaccatcaacaaggctacgtgctttcaattgatcctaggaggaactgatactacaacggtcactctaacatgggccctttccttgatgttaaaccacccacatgtattgaaaaaggcccaagatgagttggacatccaagtaggcaaacacagacaagtggaggaatcagacatcaagaacctaaaataccttgaagctgtgatcaaagaaaccttacggatgcgcccagtaggcccacttttaggcccacgagaggcgatcgaggactgcaccattggtggatatcgagttcgagcaggcacacgcgtaatggtcaatgcttggaaggtgcaacgtgacccatcggtttggccaaaccctgatgacttcaaaccggagaggtttctcaagaaggatattgacttcagggaccaaaactttgaattcatccctttcgggtccggtagaagggcctgccctggaatatcatttgccgtggaactaytgcccatggctttggcccgtttactacatgggtttgagcttaagactcaattgggttgcaaggtggatatgacagagcatgccggtttagttcatgctaaggctacccctttggaagttcttgtcagcccacgcctgtctcgagagttgtatgtatcgtcttag

SEQ ID NO: 73 - DNA, 1590 bp, Menispermum canadense
atggattcaactgatcatcacctggcccttgtaatacccactcttctagctacccctgtcttattgttctccttctactgtctcctcttgagaccaaggagtctcaaaaaacctcgtactaacaaaccacctgaaccttctggttcatggcccatcatcggccatctccatctcttaagccaaggcctacctcacataacactgggagccatggccgacaagctcggaccagccttctcaatccgcctcggcacgcgccgagcactagtggtcagcagctgggaggttgctaaggagtgttacaccaccaacgaccgagccttcgcgagccgtcccagcagcatagcagtcaagctcatgagctacaacaactccatattggggttcgctccgtacggacagtactggcgcgagctgcggaagatagtggtgctccagcttctctcgaaccggaggctcgagtcgctgaagaacgtttgggaatctgagattgatttgtctataaaggagttgtacgatacatgggcaagtaatagaggaggagaagcgttaatggtggacatgaagcagtggtttggagaccttacgatgaacatagtggtgaggttggtggtggagaagcgttgttttgggagaagcgtgggtgacgatgagactgaggcgaggaggggccagagagcgctgaaagagtttttaaaactggtgggtttgtttttggtggaagacgcgtttccatttttgagttggttggatgttcaggggcatcagagagagatgaagagaatagcgagagaactggactcgctgtttcaggggtggttggaggaacataagaggaagagaagcataaaaggtgaggccaaaggagatcaggacttcatggacgtgatgttgtctgtactcgaggattctaccatcagcactgatatagaagatgacacagttatcaagtccacatgcttgactgttgtcttgggagggagcgacagcacagtgggaactctcacttgggccctctccctactcctaaacaacagacacgaattgaaaaaggcccaagatgaattggacgcctatgtgggtaaggaaagacaagtggacgaatcagacatcaagaacctcgtgtacctacaggccatagtcaaagaggttctgcgactctacccagcgggcccactatcaggcccacgagagtccgttgaggacactgtggtagcaggttaccatgttcccaaaggcacacagctcatagtgaacctctggaagattcaacgtgagccgtccatctgggccgaccctctagagtttcaaccagagagatttctcacgacccacaaaggcatggacgtgtggggccagcacttcgaattaatcccttttgggtccgggagacggtcgtgcccgggcacagcgttcgcccttcaagtgattcacctcacattggctcgtttgctacatgggttcgagctcaccacaccatgtggtgcacctgtggatatgagtgagagcgctggtctcattaatgtcaagaccacgccagttgaggttcacgtcgctccacgcctccctctcaagctatataaatcataa

SEQ ID NO: 74 - DNA, 1590 bp, Menispermum canadense
atgattttaattgcaatgggcaaccacattgaactgcaagatatcatactgtattcccttggattttttgctgctactattttatggagaatttttagtacctatgtccttagaaggaacagttgctccagaccaccagaagcagccggaaaattgccgttaattggtcaccttcatcttctaggagcgaacaagatattacatcatacacttggagacatggccgatcgacacgggccaatcttttctttgaatttgggaattaaaagaactcttgtgatcactagttgggaagtagcaaaagaatgttttacaacacaggacagggttttcgccactcgtccgaaatctttagttggaaaagtagtaggatataatagcacagttatgatatttcagcagtatggaccatactggcgcgagatacgcaagctagcaatgattgagcttctgtcaaatcgtcgactggaaatgctcaaacatgttcgggaatcagaggttaatcttttcatcaaggagctatatgagcaatggtcaagcaatgagaatggaagcaaggttgtggtggaaatgaaggaaaggtttggagatctgacaacaaatattgtggtcaggacagtggcaggtaaaaaatattctggtactggtgtgcatggtaatgaagagtcgaggcgatttcagaaggcaatgacagattttatgcacttagcggggctgtttatggtttctgatgcacttcccttgctcggttggattgatacattcaaaggatacaggggaaaaatgaacaagacagcagaagagattgatcatgtacttggaagctggttgaaggagcatcagcagaaaagaaaaaatatcagcattaatcatttagacgaagactttatccatgtcatgctctctgccatggacgggaaccagtttcctgacatcgacaccgaaactgccatcaagggcacttgtttaagtcttatcttaggtggttatgatacaacatccgccacacttacgtgggcactctccctaatcgtcaacaaccatcatgtgttgaagaaagcacaagatgaaatggacaagtacgtaggaagagatcgccaagtaaaggaatcagatgtgaagaatttaacttatttgcaagccattgtcaaggaaacactgcgattatatccagcagcaccactatcagtccaacacgaagcaatggaagattgcacggtggcaggatgtaacattccagctggcacgcggttagttgtgaacctctggaagatgcatcgtgacccgaaagtttggtctgaccctctagagtttcaaccagacaggttcctgcaaaaacatgttaatgtggacatttggggtcagaattttgagcttttaccatttggatcaggacggaggtcatgccctggtatcacatttgcgatccaggtcctgcacttgacacttgctcaattgcttcatgcgtttcaactgggaactgtctttgcctcgcccattgatatgactgaaagttcgggtgttactaacccaaaagcaactccactgcaagtaactcttaccccacgactgcctcctgaagtctactaa

SEQ ID NO: 75 - DNA, 1542 bp, Menispermum canadense
atggattcaacctaccaacttctctctgccctattgttcatcctctgcctttactatctcgtctgtaaaccaatcaccaaaacaaaaaacgacgaagctcctgtaccagccggagcatggcccatcatgggccacctccacatgctccgcggcccaaacctccctcacataaccctttcatccatggccgacaaacacggcccggccttcacaatccgactcggtacgcgccgagccctcgtagtcagcaactctgatctcgcgaaggagtgcttcacagtaaacgacaaggccttctcaacccgcccgagcaccgtagccacgaagctcatgggctacaacaacaccatgttcgggttcgccccgtacgggccgtactggcgcgagttgcggaagatagtgatgaccgagcttctgtcgagccgaagactcgagtcgctcgcgagcgtttgggcctctgagattgagtcctcggttaaagagttgttcgcggaatgggctgaaaacagggcgaagggtccagtggtggtggagatgggagagtggtttggaaacttgacgctcaacatagcgcttcgaatggtggtggggaagaggtatttgagagaagagtcgcggaaatgcttgaaagcgatgagggattatccggagctgtttgggaggtttttggtggaagacgcggttccgtttcttgggtggttggacttgattcaggggtatcagagagaaatgaagaaaacagcgagagaactggactctgttcttgaaaaatggctagtggaacataaagataagagaggttctggggaggggaaaggagagcatcaggacttcatggacgtgatgatatcggtacttgaagattcaaagctcagttacggagaggctgatacggtcaataagtcaacttgcctgaatctaatcttaggtgcaactgacacaacaatggtggctctcacatgggccctctcacttctactcaacaataaacaagtcctcaaaagagcccaacaagaactaaaatcccaaatcggcaataacaaacaagtgtcccaatccgacatcaagaacctactttatctccaagccacagtaaaagaagcactgcgactttacccaccagagccgctatctggcccgcgagaggccctcgaagactgtaccgtcgccggctaccgtgtccgagccggcacacggctgatagtgaacctgtggaagattcatcgagacccgtcgatatggcaggtccctctcgagttccggccggagaggtttctcacggcccacaaagatgttgatgtgtggggccagcacttcgagctgatgccgttcgggtcgggcagaaggtcgtgcccgggcatctcgtttgttcttcaagtggttccgttgatattggctcgtttgctacacgggttcgaactcacaacgcctggcgaggctttagtggacatgagcgagagcgcaggtcttgtgaacgccaaagtgacaccccttgaagttgttatttctccacgcctcccgctcgagctctttgcgggttaa

SEQ ID NO: 76 - DNA, 1605 bp, Menispermum canadense
atgattatgatgttcatcgactactactcctcatggcttccccaaactctactacttcaatcaattttactagctgtttccctagtcatcttcatcaatctctttctcacgaggaggaggagctactcctccaaatcccacaccaatatcatacaccctcccaaggccgccggagccctgccggtaataggccacctctacaccctctttcgaggcctctccgccggcgttcctctctaccggcaactggatgccatggccgaccgttacggccccgcgttcatcatccaccttggcgtctaccctaccctcgtagtcacgtgccgagaactcgccaaggaatgtttcactacaaacgaccaaacctttgccacgcgccccagcacgtgcgccggcaagtacatcggctacaactacgcgttcttcggcttcgcgccctacggcccgtactggcgcgaagctcgcaagatcgccaccgtcgagctgctctccaactaccgcctcgactcgctgcgccacgtgcgagaagctgaggtggggcgcaacgtggacgagctctacgccctccacgcgtcgtcatcaacgaataagcaaaacatgatgaagattgatatgaagcagtggttcgatcaggtgacgctgaacgtgattttgatgatggtggtggggaagcggtgcgtgaccactggtgggaatgaagaggaggtgagagtggtgaaggtgttgcacgagtttttcaagcacctagggactttgtcggtatcggacgtggtgccgtacgtggagtggatggatctggacgggaatatagggaggatgaagagcacagccaaggaattagattgtatattagggagatggttggaagagcaccgccgtgagaggaggagtgatttcatggacgctatgttggcgatggtggaggggattaagataccttattatgacagcgacaccgttattaaagccatttgcctgaatctcctcaacgctggatccgatacccttggcatcacgatgacctgggcactgtcattactccttaacaaccgccacgtgttgaagaaagtcaaagatgagctggacgtccacgtgggcaaaaaccgacaagtggaagagttagacgtcaagaacttggtgtacctccacgctgtcgtcaaggaaacgctgcgcctcttccctcccgcgccacttggcgtgccacacgaggccatggaagactgtgtcgtgggaggcttccacgtggcaaaaggtacacgtctcgtcgtgaacgtgtggaagctgcatagagatcctagcgtctggtccgaccctctggcgttcaagcccgagaggttcttggacaacaacacggttgacgttagaggtcagcacttccagttattgccattcgggtcgggcaggcggggctgcccgggaatcacgttcgcgcttcaggtggcgcacctgacgctcgctcgattgctgcatggattcgagtgggacacaccggatggtgcgccggtggacatgagcgaggtctcggtattgaccacggcaaaaaagaaccctgttgaggttttgttcactcctcgtcttccggcagaggtctacacgcaaaattag

SEQ ID NO: 77 - DNA, 1572 bp, Menispermum canadense
taccaattattattccttcaaaccgccattgcaggcctactgttcgccttagcactactagtgcgccttcgcttctcgaggcgtaacaatggcaagaagaagcaagcaccaccagaaccagccggagcacggctcatcatgggccacatccacatgctcaacagtggcgagcagcctcacaagaccctcgctgcactggccgaccaatacggcccagtcatcaagctccgcctcggcctacgcgacgccatagtagtaagcaattgggagatggccaaggagtgtttcaccactaatgacaaaatcttccttagccgtccccagaccgtcgtgtcaaagttcatgagctacaacctcaaaatgctcggcttcgctccttacggcccgtactggcgtgagattcgcaagatagtggtgtctgagctgctctcgaaccgccggctcgagctgctgaagaacgcgtggacctctgagatcagctcgtgggtgaaagagttgtttgacgagtggggtgcgaaggaggcgagagggcctgttgtggtggacatgaggcattggttcgggaacttggcgttcaatatagggatgaatatggtggctgggaagaggttttttgggccgagagtggtgtctgacgaggacgggttgcggcgagtccagcaaggcctcacggatttctttaggctaataggcgcgttcttgttggaggatgcggtgccgtttctaagctggtgggacagtcaggggtatcagaaggagatgaaggacactgcgagagagatggatacactgattcaaggattgttggacgagcataaacgtaggagatcatcaagctctggtgaggccaaaggggagaaggacttcatggacgttatgcttaatattcttgaaggttcaaagttccccagtggagacgctgataatatcaacaagtctacttgcttgtctctaatgctcggcttgacggacacaacaacggcgaccctcacatgggctctctccttgctacttaacgacccgcgtgtcttaaagaaggctcgagaagagctggatttccacgtcggaaagaacagactggtggacacatcggacttaatgaacctcccatacatccacgccatagtcaaagaagtgttgcgtctccacccaccggcgcctctctccggccaccgtgaatccttggaggacagtgtggtgggcggctaccatgtccccaagggcacccgctttatggtgaacgtctggaagatccaccatgacccgaataagtggcccgaccctattgagttccgacccgagaggtttctgaccacccacaaagatgtggaagtgtggggccagaactttgaactgattccgttcagttcaggaagacgagtgtgtcccggggcttcgttgtctctacaagtgcttccgttcacactggctcgagtgttgcaagggttcgaagttgcaacaccaggaggtgcgccggtggatgtcacggagagcaaaggcctctcaactgctaaagagactccgcttgacgtcgtgatcactccgcgtctccctgaaaagttctaccattga

SEQ ID NO: 78 - DNA, 1587 bp, Nandina domestica
atggattcactcatttcatttcaagcaatagttgggcttttcatcttgatcctagtttcctatcaatggcttggaaggtctagaagtattaagactaacaagcataacgaagcaccggaaccagccggcagatggcccatcatcggtcatctacatttactcggagggtcggaccaattactctatcgaacgctagggtccatggccgataaacttgggccggcattcaatatccggcttggtagccgtcgggcctttgtcgttaacagttgggaggtggccaaggagtgtttcaccatcaatgacaaggcccttgctagtagacccatcactgtggctgcaaagctcatgggctataactatgcagtctttgggtttgcaccatacagcccattttggcgagcaatgcgaaaaatagccacacttgagcttctttctaatcgtaggctcgagatgctcaaacatgttcggatctcggaggtggacatgggcttgaaagaaatttatgggctttggtccaagaacaaggattcaggccctttaatgattgaactaaacaggtggtttgagaacttgactctaaatatggttgtgagaatggtggctggcaagagatattttggtgctgatgcatcatgtgatgagaacgaagcgcagcgctgccagaaggcaatcagtgaattcttccgtctcattgggatatttgtagtatccgacgcgattccttctctatggtggttggatttgcaggggcatgagaaggccatgaaaagaactgccaaggacctggattctatactaggaggctggttggagcagcatcggtcgcggagagtcaatggtaaggtcccaaccgagggggaacaagacttcatcgatgtgatgttatcgctacaagagggcgatcatctctctgattttgagtatgatgctgatattgccatcaaatcaacttgcctggcacttatcctaggtggcagtgacaccactgcaggtaccctaacttgggctatctcattgctactaaaccatccctatgctttgaaaaaagcccaagaggaattggacctccatgttggcaaggacagacaagtctatgatcaagacatcaagaatctggtatatcttcaagccatcatcaaagaaacactgcgcctatacccagctggtccactattgggcccaagggaggccatggaagactgcaccatatcagggttcgatgttcgagctgggacgcgcttggtggtaaatgtttggaagattcaacgagacccaaacgtgtggtcgaacccatctgagttttcacctgaacggtttttgacaagccatgtggatgtcgatgttaggggacaaaatttcgagctcatgccatttggatcaggccgacggtcttgtccaggcgcttcatttgccctccaggtcctgcatttgacattagcccgttttcttcatgggtttgggttggcaaacccattgggaaaacctgtagacatgaatgagagcccaggactaactatcccaaaagcaacacccctaaatgtgctgctcactccacgtcttgattcagagctatatggttgctag

SEQ ID NO: 79 - DNA, 1563 bp, Nandina domestica
atggaaacctttcagttccttggaattccattgtttggcttctttgccttattatgcacttactacctagtattgaggaagccatcatccactaagatcagggagccacctcggccagccggagcatggccaatcatcggccatctccatttacttgcccggggtgacctcccccacgtaactttggggaagatggctgataaatatggcccagtcttcaagttaaagcttggtgtccgacaagcaattgtggtaagtgattgggaggtcgcaaaggagtgttacaccaccaatgatcgtgccttagccaatcgtccaagtggcctaggagcaaaaatcatgggctacaactatgctttgattgggtctgccccctatggcccatattggcgtgatttacgcaaaattatcacgcttgaagttctctcgagccgtcggcttgaatcactcaagcatgtatgggactctgaaatatccacatctgtaaaagaattgtaccaaatatgggcagatcaaaacaaagctcaaggccaagtttctgttgaaatgaaacaatggtttagtgatatgacactaaatgtggcagttaggttggctgtcggaaagaagtacttaggtgcaactgccgattgtgaaaagaataaggcagtgcaatgtcaaaaggccatcaggaattttttcagactcgctggtttgtttgtggtggcagattaccttccatttctgggctggttggacttgggagggcacgaaaaagagatgaagcacacagcaaaagaactcgattatatagctcaagaatggttggatgatcataaaaagaagagaacctccaatcggacagtggacgagccacaggatttcatggatgtgatgctctcgatcttggaagaatcgactttcacgggttatgatgttgatatcatcaacaagtccacatgttttgcattgatcctaggtggaacagacactgtggcagttactctgacatgggctctctgtttattactgaacaatccacatgtactgaaaaaggcccaagatgagttggacatccacgtcggcaaggatcgacacgtcaatgaatcagatatcaagaacctcgtttacctccaagctatgatcaaggaaacattgcgcttatatccagctggtccgctactaggtccccgtcaggtcattgaggactgcaccatagctgggtaccacgtacgagcagggacacgtgtgatagtcaatgcttggaagtttcaacgagacccgtcgatctggtcaaacccttgtgagttccaaccggagagatttctggacaaagacatcgatgtgaagggtcaacacttcgaattgatccccttcggagcaggcagaagggcatgccccggaatctcctttgctcttcaagtattaccattggcattggctcgtttactacatggttttgagcttaaaaacccatcggaaagccaagtggatatgactgagacccccggtatggttcatgccaagacaacccctttggaagtacttatcacaccgcgcttgtctccaaaattttatgtataa

SEQ ID NO: 80 - DNA, 1488 bp, Nandina domestica
tggaagaggccaacctctgttaagtacagggaggcaccccaaccagctggcgcatggcctatcatcggtcatctccatttactggcccgtggagacctacaccacataactcttggagccatggccgacaagtacggcccagctttcatgatgcggcttggtgtgcaccaagcaatggtggtgagcgattcggagtctgcgaaggagtgttccaccaccaacgatagggtcttggccactcgaccaagtagcgtagctgtaaaacttatgggctacaactatgccatgtttgggttcggcccctatggatcatattggcgtgaaatacgtaaaatagttattcttgaggtcctgtcaaaccatcggcttgagtcactaaaacatgtatggaagtctgaaatatccatgtccaccaaagagttgtaccaattatggataaaccaaaacaaggatgaaggcccgactttggttgaattgaagcaatggctttgtaacatgacactaaatataggagttaggactgttgctgggaaaagatactttggcgcaagttcttgtgatgcaaatgaatcaaacaggattcaaagggcaatcagagatttctttagatttgtaggtttgtttgttgtgtcagattttcttccttttctagggtggttggacttggaaggttatcagaaggagatgaagagtattgctagggaacttgattctatccttcagggatggttggatgaacacacaaggaaaagacaatctggtgggaccaacgaaaatcaggattttatggacataatgctttcagttcttgaacattcgaatgcattgactcactatgatgcagatacaatcaacaaagcgacatgctttacaatgatcttaggtggaagtgatactacaatggtcactctaacatgggccctctccttgttactgaacaatccacatgtcttgaaaaaggcccaagatgaaatagatatccaagtaggcaaggacagacttgtggacgaatcagatatcaagaacctagtatacctccaagctatagtcaaggaaactttgcgtctgtacccagctgttccaataataactccacatgaggccatagaagactgcaccatagctgggtatcatgttccagcaggcacacgcctcattgtgaacgcttggaagatacaaagagacccattgatttgggataaccctggtgagttccaaccagagagatttctctacaaagatgtggatgtgaaaggtaaacatttcgaattaatccctttcgggtccggtagaagggtgtgccctgggatctcgttggccctccaagtggtgtcattggccatggcccatctcctacatgagttcgaccttgcgaaaccatcagaaggcaatgtggacatgactgagagtgttggtttggttaatgctaaggcaacccctttggaagtacttatcactccgcgcctatccccaaagttttatgaatag

SEQ ID NO: 81 - DNA, 1578 bp, Nigella sativa
atgggttccttcaaccaaataaatccatctgttgtatactttgctgcctttaccatcttcttcttcttctttctctataaaatattatacaagagaagaaccagtgcgaagaccagagttgctcctgaacctgctggtgcgtggcctttcataggtcacttacccttgctatcccagcaaaacttgccccatgtaacattgggggtgttggctgacaaatacggaccagctttcactgtccaactcggcttacacaaagctgttgtggtgagtagttgggaggttgcaaaggagtgcttcactgtcaatgacaaagtgctcgctactcgccctagctcagttgcagtgaagattatgtgctataactatgctgtgtttggctttggaccatatggttcctattggcgtgaagctcgcaagatagttgtacgggagcttctctcaaaccatcggcttaatttgctaaaacatgttctggtcactgaaattagcatgtctatgaatgaattgtacacagtttggcaaaagaatgctaataatgttagtggaaaagctttggtggagatgaagcaatggtttggtgacttgtcattgaacatgattgtcaagatagttgctggaaagcgatacttccaagctagtgcaaattcagatgaaagggatcagttgaaaaggggagtgcaagatctcttccatttggttgggctgtttctggtgtcagatgcacttccatttcttagctggttagacattggtgggcatgagaaagccatgaggagaactgccaaggagcttgacaacatactggggagttggttggatgaacataaacaggctaaattggcaggggcgacaaagggagagcaagactttatggatgtgttgatgtccatactagaggataacaataatctccctgagtatgaaccagatgttgtcagtaaagctatttgcttgggtatgattttgggtggagctgataccacaacaattactctgacgtggattgtgtccttactactcaacaatcaacacattttgaagaaagcccaagatgaaattgacagcaaagttggaaaagatagacaagtaaatgaatcagacatagaaaaactggtatacctccaagcaattgtgaaggagacattgcgtctgtacccacctgctcctctgtcaacacaacatgaagccatggaggactgcaccatagctgggtatcatgtccaagctggtacaagattgataacaaatatatggaagattcaaagagatccaggggtatggccgaatccttgcgagttccagccagagaggtttctcactacccatgccaatgtggagtcaaatggaaagcattttgagtttattccatttggatctggtcgacgggcgtgcccaggtatgtcacttgggcttcaggtggtgcacctgacattagcacgtctgctacaaggttttgaattggaaactccgttgagtgtggaagtagacatgactgaaagtgctggacttacaaatctcaaagtaacgccccttgaagttttaatcaatccgcgtctaccttcaaatctatactag

SEQ ID NO: 82 - DNA, 1554 bp, Nigella sativa
atggatttgacaagcatcttgatttgtatctttcttttcatcatttctatctgctttctgtcatggaagcgatcaaggagtctttccggaaccagagcagctccggaaccagttggtgcatggcctgtcataggccatctaaggctgctaatggggtccaaaacacctcatatgaccttaggaaacttggctgacaactatgggccggcattcaccatccggcttggtacgaagaaaacactggttgtaagtagctgggaggtggccaaggagtgtctcactaccaacgacaaagccttcgctggccgccacagcactatggcggtggagataatggggtacaactatgccttcttcagcttaggtcctagtggtcaatattggcgtgaaattcgcaaaataacagtttctgaacttctttcaaatcgtcggttggagttacttaaacacatatggagctcagagattaagacttctatcaaagaattgtatgaaatttgtgcagcacaaagtcaatatgggaaaaaacagtctcctatggtagaaatgcagcaatggtttagtcatttgaacttgaatttatcagcaagaatggttgttggaaaacgatattttgctgacggtgttgaagaaaatgaaggcgatatcagacgatttcaaaatgcaatcaaggagttcttttactgggctggagcgtttataatagctgatacaattccatatctaaggtggatggatttcttaaatgagcggtcaatgaaaagaacagcaaaagaaacagaccatgtacttgaaggatggttgcaggaacacaaacgaaacaggctgaacggtgtaacgaaggagcaagatttcatggatgtgctgctgacagaacttggtgacaaagatctgtgtggttacacagctgatgttgtgaacaaggccacttgcctgaacatgatttttggaggaacagataccacaaaaacgggcatgatatggactttatcattaattctcaacaatccacaagtactaaagaagttacaaaatgaaattgacatccaagttgggaaagacagacaggttgatgattctgacatagggaatctcgtgtacctacaagccactgtcaaggaagcgatgcgcctgtatccacctgctaccatatttggacgtgaatccatcgaggactgcactgtggctgggtaccacatccaagctgggacacgtttgattgtgaatgcatggaaaattcaaagagatccaaatgtatggcccaatcctgacgaatttcagcctgagagatttctgacaaaccaagcagatgtggacttcaggggtcaagattttgagctcattccttttggggctgggagaagggcgtgtcctggtatttcattgacagttcgggttacacatttgacactggcatgtttgctacaaggcttcaactttgaaacccccttgaatgaacctgtagatatgtccgagaaatatggtttaaccaactcaaaggcaacccctctgaatgttatactcacaccaagactcccttccaatttgtactag

SEQ ID NO: 83 - DNA, 1593 bp, Nigella sativa
atggattcaatatttcatatgtatgcaccaattaatatccttgctgctacctttgtttttattgtcatttctgtgtggtttctgttatggatgaagagatcgagaaagaatagcaagagcagaagagctcctgaaccggtagggggatggcccttgataggtcatttgcgcttgttagtcggccctgagttgccccatgtaatattgggaagcttggctgacaagtatggaccagctctctccatccggcttgggatgcgtcaagcattggtggtcagtaattgcgaggtagttaaagagtgtctcaccaccaatgacagatgcttctccactcgccctagctctgtcgcagtagagttaatgggatataactatgcgtcgtttggtttaggtccttacgggggcttctggcgtgaagttcgcaaaatcgcaattcttgagctcctctcaaatcatcgtttgaagtctcttaaacatgtatggatatctgagattagtggttttgtcaaagaactgtaccaattatgtgtagctaatggcaatacaggaaggcaatctgctttggtggaaatgcgacagtggttaaatgatttgacactaaatgtgtctgtcagaatggttgttggaaagcgatactttggctctggtagtgaacatggtggtgaagatgtcaagcggtttcaaaaggcaattaaagatttctttcgtttggcaggaaaattcacgctggcagatgcaataccattcctaaggtggttggactttggtcatgaaagagccatgaagaaaactgccaaagagttggactatgtacttgcaagatggttggatcaacatcaaaagaacaaactcaattgcgaaacaaagcaggtggatcaagatttcatggatgtcatgttgactgtccttggtgataaagatctgtatggtttcaaggctgatgttgtcaataaggccacttgccttaatttgatcttaggtggggttgacacgacgtcagtgaccctaacatgggcattgtcattgctactaaacaatccaaacattctaaacaaggcacaagaagaaattgatgtccagattggaaaagatagacaagttgatgacaatgacttgggaaaactagtgtacctagaggcaattgtaaaggaaacaatgcggttatatccagcaggtccactgtcaggtgcacgagctgcgatagaggactgcatggttgcgggatatcatgtaccaaaaggaacacgactgattgtgaatacatggaagatacagagagatccagagaaatgggacaaccctagtgagtttcggccggagagatttctgatcaccaccaccaatggccatgtggaagtgtggggtcaacattttgagtacattccttttggatcagggagaagaatttgtcctgccatctcattttcacttcagttggtgcatttgacattggcccgattgctacaagccttcagctttcaaacaccatcaaatgcagcagtagacatgactgagacccctggcctggtcaatttcaaagccaccccgctccaaattttactcactcctcgacttccttccagtttatactaa

SEQ ID NO: 84 - DNA, 1584 bp, Nigella sativa
atgctcagtattcatgattcaaccatggtttttctccaactacaagctatttgtggcatttttggcttcattttcattattacatggtggacaagatggaaaagttccaacaaaatgaaagcaccagaagtagctggtgcatggcctgtaattgggcacctgcatctgcttgggggcggccgtcccttataccagctccttggagacatgtctgataagtatggaccagcttttaccctccgaatgggaatccaaaaggcacttgtagtgagcagctgggaagttgcaaaagagtgtctaaccaccaatgacagagctcttgctacccgcccatcttcggctggagggaagtacatgggttacaacaacgcacttatccccttcagcccttatgggccatactggcgagacatgcgcaagattgctacacttgagcttttatctaatcatagactagaggagttgaagcatgtccgagaaatggaaatcaacacttgtatcagtgacatgtacaaactttgtcaggttgaggatggagttgaaattaaaccaatttctgtagatctgagtcaatggtttgcagatcttaccttcaatgtagtggtgatgatgataacaggaaagagatatattgggtcaactgatgcaggtgacatgaatgaaataagacattttcaggcagcactggttaaatttatgaggctattgagaatctctcttctggtagatgtatttccagttctacagtggattaattatgggggattcaaaggagtcatgaaatcaactgctagagatattgattccgtacttgaaaattggctgcaggagcatcagaggaaaagactttcccctgatttcaatggaaaccatgattttattgacgtgatgatatctaccttagaaggcacagaattctctgattatgaccacaatactatcataaaggcaatatccatggctatggtcgtgggcggcactgatactacaactacaacacttatatgggctatttcccttctattgaataatcctaatgcgatgaaaaaagttcaagaagagttggagatacatgtaggcaaggaaagaaacgtagacggatccgacatacaacatttggtatacctccaagctgttgtgaaggaaactctcaggctatatcctcccgttccactctcagtaatgcaccaggccatggaagactgtgttatcggaagttacaacattcaagcaggtacgcgtgtacttttcaatctctggaagctacaccgtgactcgtcagtgtggtctgatcctttagaatttcgaccagagagatttcttactagccatgttgatgtagacgtcaggggtcaacattttgaactgataccttttgggtctggaagaaggtcatgccctgggatttcatttgctcttcaggtcatacacttgacaatagctcgcttatttcatggattcaatctgacaacacctgggaattcatcagttgatatgagtgagatttctggagctacattatcaaaagttactccattagaagtactagttactccacggctgtcttccaagctttacaattga

SEQ ID NO: 85 - DNA, 1566 bp, Nigella sativa
atggatttcttgatctacgttgctgcctttgccgccgccttcttcttcttattgttctacaacatattatccaagagaataaccggtacaaagagaagaattgctcctgaacctgctggtgcatggccttttattggtcacttgcccatgctcttcgggcccaacttaccccatgtaacgttgggtgccttggctgacaagtatggaccagctttcactatccagctgggcttacacaaagctcttgtggtgagtagttgggaggttgccaaggactgcttcactgtcaatgacaaagccctcgccactcgccctacctctgctgcagtgaagattatggcctacaactgtgccgtgttcagtttctcaccatatggttcatactggcgtgaagcacgcaaaatagctatacttgagcttctttcacaccataggcttgatttgttaaaacatgttcggaaatctgaagtaagcacatctataagagaactgtaccaattttggcaaaaaaatgctacggaagttactaaatttgctcagctggaaatgaagcaatggtttggtgatttgacaatgaacctgattgtcaggatggttgctggaaaaagatatgctagtgttcaatcagatgatgatggtgaggggaaaaggctacaaaaggccgttaatgatttcttccatctagtagggttgtttgtggtatccgacgcacttcccttccttggttggttagatattgggggcaacttgaaaaccatgaagaaaactgccagggaacttgacagcataatggagtgttggttgaaggamcatcaagctcggagatcaaatggggagcaagatttcttggatgtgatgttgtccatactgcgtgaagataataagctgcaagagtatgatggtgatgttgttgtcaaagctatgtgcttgaatatgattttgggtggagctgatagcacaacaatcactctaacatggaccatctccttactacttaacaacagacacattttgcagaaagcccaagacgaaattgacagcaaagtggggaaagatagacaagtgaatgaatctgacatagagaaactagtataccttcaagcaattgtraaggagactttgcgtctgtacccacctgctcccctatcttcacaacatgaagccatagaggactgcacaatagctggctaccacatcccagctggtacaagattaataacaaatctatggaaaatccaacatgatccaagtgtatggcacaatccttccgagtttcagccagagaggttcctcactacccaggcgaatgtggactttagaggtcagaatttcgagtttattccatttggatttgggcgacggtcatgcccaggtacctcacttggtcttcaaatggtgcacctgccattagcacgtttgctacaaggctttacatttgaaacaccatcaaatgcagctgtggacatgactgaaagtgctgggcttacaaatcacaaagtaacaccacttgaggttctaatatcaccacgtctccgtttcgatctttatcaagaatctcccccttga

SEQ ID NO: 86 - DNA, 1580 bp, Nigella sativa
attccttcaaccaaacatatactggttttatctgcttatctgtctttgcctccttcttcttcttcttcctttacagcgtgcagcagaagaggagaacaggtagaaaggccagatacgctcctgaacctactggtgcatggcctttaataggtcacttgccaatcttgttcgaacctaacttaccccatatacagttgggagccttagctgacaagtatggaccagtgttctctatcaaacttggcttacggaaggctcttgtggtaagcagctgggaagttgtcaaggagtgcttcactgtcaaagacaaagtccttgcctcccgccctagctcagttgctgtgaagataatgggctatgattatgccgtatatgcattcggaccatatggatcatattggcgtgaagctcgcaagttaactatacttgaacttctctcagaccatcggcttgatttgctaaaacatgttcgggtctctgaagttagcatgtctatgaaagaactactcaaattctgccaaaagaatgccaataatgtcagtggaaaagctttattagtagatatgaagcaatggttcggtgacttgacattaaatgttattgttaggatggttgctggaaagagctacttgggtgctagtgcaaaattggaagacggcgaacagaaacggttacaaaacgcaattcatgagtttttccgtttggcggggctatttgtggtgtcagatgcacttccaattcttagctggttagacattggggggcatgagaaagccatgaggagaaatgccagggagattgacaagataatgagcagttggttggatgaacatcgacgcaataaattggccggggtaacaaatggagagcaagactttatggatgtattgttgtccaaatttgagaatagtaatctccctggatatgaacctgatgttgcaatcaaggctatttgcttgaatatgattttaggtgcagctgataccacaatcgtcactctaacatgggttgtgtctttaatacttaacaaccgccaaattttgaagaaggcacgagaggaaattgagaataaagttggaaaagataggcaagtgaatgaatctgatatagagaaactagtatacctccaagcaattgtgaaagagacgttgcgtttatacccagctgctcctctatcagcacaccatgaatccatggaggactgcaccattgctggctaccacgtcccagccggtacacaattaataacaaatttgtggaagatccaaagggatccacgagtatggcctaatccttgcgagttcctaccagagaggttcctcaccacgcatgcaaacgtaaactataagggtcagaattttgaattcattccatttggatatggtcgaaggtcgtgcccaggtatgtcatttggacttcaaatggtgcacttagtattggcatctcttctacaaggctttgaattggaaactccattgaatgaggcggtagacatgactgagagcgctggacttacaaatctcaaagcaacgcctcttgaagttctaattactccacgtatgcctttgaatctatactga

SEQ ID NO: 87 - DNA, 1530 bp, Nigella sativa
gtaactgttatctacttatttacatttgccatcttcttctacctctacagcatattatggaagaacccaagaaagagtgcaaagaccagagttgctcctgaaccagctggtgcatggcctttcatgggtcacttgcctatgctattggaacccaacttgccccatataaagttgggagccttagctgacaagtacggaccagccttcactgtccaactcggcctccacaaggctctagtggtgagcagttgggaggttgccaaggagtgcttcactgtcaatgacaaagtcctcgcagatcgccctagctcagttgcagtgaagataatgggctatgataatgctgttttcgcctttggaccatatggttcttactggcgtgaagctcgaaagatatctacagttgagcttctctcgaaccatcgtcttagtttactgcaacactttcgaatttccgaagctagcatgtctatgaaggagctatatcaactttgtgccaataacgggaaggctttggtggaaatgaagaaatggtttggtgacttgtcattgaatgtaattgtcaggatggttgccggaaagaggtatgccaaagctagtgaagatgatgaacggagacagttacagaaggggcttaaagatttcttttatttggtaggattgtttgtagtgtcggatgcacttccaattctaagttggttagacattgggggccatgagaaagccatgaggagaaccgccaaggagcttgacaccataatggagaggtggttagatgaacatagacgggctaaattggctggggtgacaaagggagaacaagacttcatggatgtgttgttgtccatacttgaagatggcaagcttcctcactatgaatctaatacagttaacaaagctatttgcttgactatgattttgggtgcagctcataccacaacagtcactctaatttggacattatcgttactacttaacaatcgacatattttaaacaaggctcaagatgaaattgattccgaagttgggaaggatagagcagtgactgaatctgatataaagaatctagtatacctccaagcaattgtgaaggagacgttgcgtttatatcctgctgcacctctacctgcccaccgtgaagtcatggaggactgcatcatagctggttaccacgttccagttggtacaagaataataacaaatttatggaagattcaacgagatcctcgtgtatggtctaatccttgtgccttccaaccagagaggtttcttactactcattcaaatgtggactttaggggtcagaattttgagttcattccatttggatctggtcgaagatcatgcccaggtatctcacttgggcttcaaatggtgcacttggcattagcgcgtctgctgcaaggatttgagttagaaactcctttgaatctgggaatagacatgactgaaagttctggacttacaaatcttaaagtaacaccgcttgaagttgtgatcacaccacgactaccttcaaatctatactga

SEQ ID NO: 88 - DNA, 1689 bp, Papaver bracteatum
atggcgtatttgatgatcaagaaatctttccacttgttttccgatcaaccaacttcagtttccactcttatagtacttgcttttctactgacactttcacctgttattatttactatgaacagaagaagaggggtttgaggcgaaatcggacctcatcgtcatgtaccgcaattacaacgactccgttaccagaggcatcaggtgcgtggccagtgataggtcatcttcttcttttcatgaacgaaaacgatttaaatcatgcaactctcggtaacatggctgataaatatggacctattttcagcttaagattcggtagtcatagaactctagttgttagtagttgggagatggtaaaggagtgttttacaggtgccaatgacaagtttttttcaaatcgtccttcctccttggcggttaaacttatgttttatgacactgagtcttatggctttgcaccgtatgggaagtactggagagagttgcggaagatatctacacataaactcctctctaatcagcaattagacaagttcaaacacttgcggatttctgaagtggacaactcctttaaaaagcttcacgacttatgcagcaacaacaaactgggaggagaaactacatctgtggctaatcttgtgagaatggatgattggttcgcttacttgacattcaacgtaataggacggattgtcagcggattccaatcaaatgcagtgtcaggtgccacaagcagccaggaaaaatacaagcttgcaatcgatgaagtgtcaaatcttatggcaacatttgccgtttcagatgtggttccatgccttgggtggattgaccgattgactggtcttacaggaaagatgaagaaatgcggaaagaaattagatgcagtagttggggatgcagtggaggttcatcgccaaaagaaactcaaaatttctagaaataccgcaggagaacttacggagcatgaagaagaagacttcatcgatgtttgcttgtcgattatggagcaatcacagattccgggaaacaaccccgaaatctctgtcaaatctattgccttggacatgttatcgggtgggagtgacactacaaagttgataatgacatggaccctttctttgctgttgaaccatccagacatattggacaaggctaaagaagaagtagatacatacttcaggaagaaaaagatatcggataacacacctgtggttgatgctgccgatgttcctaacctcgtctacatccaagctatcatcaaagaatcaatgcggttataccccgccagcacattgatggagcggatgaccagtgatgattgtgaggttggtggcttccacgttccagctggaacccgactatgggttaacgtatggaagatgcaacgagacccaagggtttggaatgatccattggtatttcgacctgagagattcttgagcaatgacaaagggatggtagatgtgaagggtcagaattatgaactgataccattcggaacaggcaggcggatatgtcccggtgcatcttttgccttagaagtcttgcatttggtcctcactcgtcttattcttgagttcgagatgaaggcaccagagggggaaattgacatgagggcaagaccaggttttttcaacaacaaggtagtgccactagatgttctactcaccccacgcacactagattaa

SEQ ID NO: 89 - DNA, 2561 bp, Papaver bracteatum
atgaataactactcatcatcacctgcatcatcaacagaaacagcggtactttgtcatcagcggcagcagtcgtgtgcattgccaatttccggtcttcttcacattttcatgaataaaaacggcttaattcatgtaactcttggaaatatggcggataaatacggaccgattttcagtttcccaacaggtagccatagaattctcgttgtgagcagttgggagatggtaaaagagtgttttacaggcaacaatgacactgctttctcaaaccgtcctatcccgttagcttttaagactatattctatgcatgccgtggcatagactcatacggtctttcgagtgtaccttatggaaaatattggagggagctacgaaaggtctgtgtgcataacctcctctctaatcaacaactactcaagttcagacacttgataatttctcaagtcgatacgtctttcaataagctgtatgagttatgcaaaaactctgaagacaaccagggaatggtgagaatggatgattggctcgcccaattatcgttcagtgtgataggaagaatagtctgcggattccaatcagaccctaagacaggtgctccaagcagggtggaacaatttaaagaagcaattaatgaagcatcttattttatgtcgacatctccagtgtcagataacgttccgatgctagggtggattgaccaattgactggtcttacgagaaatatgacgcactgcggaaagaaattagacttggtggtagagagcataattaatgatcatcgtcaaaagagacgattctctagaactaaaggaggagatgagaaggacgatgaacaagatgacttcatcgacatttgcttgtcaataatggagcaaccacagcttcctggcaacaataaccctcctaagatacctatcaaatctattgtcctggacatgataggtgcggggactgacaccacaaaactgaccatcatttggaccctttccttgctgctgaacaaccccaatgtgttggccaaggcaaaacaagaagtggatgcacactttgaaacgaaaaagagatcaacaaacgaagcatcagtcgtggtggatttcgatgatattgggaaccttgtctacatccaggcaatcatcaaagaatcaatgaggttgtatccggtcagcccagttgtggagcgactgagcagcgaagattgtgtggtcggtgggtttcatgtaccagcagggacgagattatgggctaacgtatggaagatgcaacgagaccctaaagtatgggatgatccattggtgtttcgaccagagagatttttgagcgatgaacagaagatggttgatgtaaggggtcaaaattatgagctgttaccatttggagccggtcgacgtatatgtccaggtgtatccttctctctggatctaatgcaactggttctgactcgtcttattcttgagtttgaaatgaagtctcctagcgggaaagtggacatgacagcaacaccaggattaatgagttacaaggtggtccctcttgacattctgctcacccatcgtcgcataaagtcgtgtgtgcagttagcatcctctgagagagacatggagagtagtggtgtaccagtaatcactctgagatcgggcaaggtgatgcctgttttaggcatgggaacatttgagaaagctggtaaagggtctgaaagagagaggttggcgatattaaaagcgatagaggtgggttacagatacttcgacacagctgctgcatacgaaactgaagaggttcttggagaagctattgctgaagcacttcaacttggcctaatcaaatctcgagatgaacttttcatcagttccatgctctggtgcactgatgctcaccctgatcgtgtcctcctcgctcttcagaattctctgaggaatcttaaattggagtatgtggatctatatatgttacccttcccggcaagcttgaagccagggaagataacgatggacataccagaggaagatatttgtccaatggactacaggtctgtatggtcagccatggaagagtgtcaaaaccttggcctcactaaatcaatcggtgttagcaatttctcctgcaaaaaacttgaggaattgatggcgaccgccaacatccctccagccgtgaatcaagtggagatgagcccggctttccaacaaaagaagctgagagagtattgcaacgcaaataatatattagtcagcgcagtctctatactgggatcaaacggaaccccatggggctccaatgcagttttgggttctgaggtgcttaagaaaattgctatggccaaaggaaaatctgttgctcaggttagtatgagatgggtttacgagcaaggcgcgagtcttgtggtaaaaagtttcagtgaagagagattgagggaaaacttgaacatattcgactggcaactcaccaaggaagacaatgaaaagatcggtgagattccacagtgcagaatcttgagtgcttattttttggtctcacctaaagggcctttcaaatctcaagaagagttgtgggatgacaaagcttg

SEQ ID NO: 90 - DNA, 1623 bp, Papaver bracteatum
atggagttcttgatgaagttattattgttacttgaaccaatcacttttagtatttttcttggtataggttctattgttcttctatacaatgtcttcttcttggttattaacaagaaaaagaagaagaaagcaccaaatgcatcaggggcatggccgttgataggccatctcaatcttttcatgaatgataaggaagcgttgtataaaacactaggaaccatggccgacaagtacggacctgcattcaacgttcgattaggcaaccaagaaatccttgtggtgagtaattggaagatggtaaaagaatgttttaacactcaaaatgataagctattttcgaatcgtcgaactacattgggtgtgaaatacatgcttaacaagaagacctctgttgccttttcaccatatggaacatattggagggagctacgaaagctaacggtgcaacaattgctctctaagcaacgtttagattcgtggaaacatttgaaaatcaaagaaatagatgcttcatttggtagacttaacgatttatgcagcaacaacaagggtactggagcagctaccccaattaggatggacagttggtttgccgagttgacgttcaacgtgttcgcaagaattgtctttggctaccaaagtggagaaaggttgatgctatcaggtgatacggcatccaacggggagaggtacaagaaaacattagaagaagcatttctccttatgtcaagctttgcggtttctgacgtattcccatgcttagagtgggtagacagatcaagaggccttgtaaggagcatgaaacgctttggagatcagctaaattcaattgcagggtgtcttattgaggagcatcgccaaaagagatcacaatccgtatcagcatcaaattctacaaatgataaaggagttggtgatgaacaagacttcattgatgttctcttatcggttgctgaactatcacaaattcctggagatgaccctgatttggtcatcaagtctatgattttggaagccttagcaggtgggagtgacacaacaacatcaaccctaacttgggttctttcactgctattgaaccaccccaaagtgttaaagacggcaaaagaggaaatagatatgcacgtcggacgtaatcgatgcgtagaagagtcagatattcccaagctcgtttatgtcaatgcaattatcaaagaatcaatgagattgtatccaaatgggtcattggttgatcgattgacgttggaagagtgtgaagttggtggattccatgtcccagctgagggacacttattcgtaaacgtttggaagatccatagagatccgagtgtgtgggagaatcctctggagttcaagccagagagatttttgagtaatgattgcaaggtggatatggatttcataagtcaaaaatatgaattcataccattcgggataggtcggaggatatgtcctggtatgctttcagcattacaggtgatgcattttgtggtagcccgtcttattcatgggtttgatatggaagcagcaagtgccgatgggaaagtggatatggcagaaaagccaggcatgacttgctataagatgacacctcttgaagttatgctcacggctcgacagtag

SEQ ID NO: 91 - DNA, 1647 bp, Papaver bracteatum
atgtatccggtaaaccagttgcagagtcaagcaattgctgtgctatgtgccgtaattgtcttcatcttctatttggggagaaagttgtttaacagtacccatattcataagcctggaaagacagcaccagaaccagcaggcgcatggccgattataggtcatcttcacctccttgggggagcaaaactcatgtaccgaaccctaggttctttggcggacgaatacggaccagttttcatggttcgacttggtatgcgacgggttcttgtaattagtaacacggcgtcagctagagagtgtttcactacaaatgataaggtttttgctacccgcccaaccacagttgctataaagttgctgacttacaatcacaccatgtttggttttgcaccttatggaccttactggcgcgagatacgcaagatagcaacaacggagctcctatcggatagacgtctagccatgctcaaaaacgtgtggatctctgagattaatttgtgcataaatgaattacatcaactcttgatggacaagaatagtagaaaagtagatcatcatcaacatgtttacaaccaaaatatggacccaatttcggtggagatgaacggatggtttgcagatttgtctttcaatgttgtggccagaatgatagctgggaaaagatatttcggaaagaacaccgatggtggcgaagaagaaaccaggaggtatcgggaagcaatgaatgattttatgcacttggtagtgatattattggtgtctgatgctgttccatttttagggggtttagacttccagggatataagaaaaggatgaagaaaactgccaaggaaattgattattttctgggtaaatgggttgatgaacatcgacagcgtttgaaatataaaaacatatccaaggttgatcaacaagatgatttcattgatgtgttactgctgaatttaaatgatcaaccgatctatggtcgcgatactgatacaatcatcaagtctacttgcctgtctcttatcgcaggtggtagtgacaccacagcagttaccctaacttgggcactatcgttactgctgaacaaccaacacgtgttaagaaaggctcaggacgagttggacatacacgtaggcagggaaagacaactggaagaatcagatatcaagaacctcgtttatctccaggccatagtgaaggaaacattgcgtttatatccagctgcaccgttatcagcaccaaggatggcaatggaagattgtacggttgcgggattccaagttagtaaaggcacacagctgatgcttaatgtatggaaactacatcgagacccgcatttttggggacctgatcctctggagtttaggccagagagatttcttactgctgatggtagtagcacgggaagtggtcattgcattgatattgatgttaagggtcggcattatgagttactaccatttggatctggtagacggatgtgcccaggagtttcatttgccatgcaagtcgttcatctgacgctcgctactttacttcacggatttcatttatcgacgccaacagatggtccagttgatatgactgaaacttcaggacttagttgccccaaagcaaccccattagaagttttgctcactccacgtctgccctgttag

SEQ ID NO: 92 - DNA, 1704 bp, Papaver bracteatum
atggatgtggcaatcatcgtcgatcaccactacttgcagccgttcgtgagtattgcaggcttattagctttgctatccttcttctattgtatttgggtctttattataaggccaaggattatcaaaagcaacttagacgagcgcaaattatcaccatcatctccacctgaagttgcaggtgcatggccgatagtagggcatcttcctcagctaataggatctacacctctattcaagatccttgcggatatgtctaacaagtacggacctattttcatggtcagatttggtatgtatccgaccctagtagtgagcagttgggagatgtcaaaagaatgcttcactaccaacgataggttattcgctactcgtccacctagtgcggccggaaagtacctcactaaagccttgtttgccttttctgtgtatggtccttactggcgggagatccgtaagatctctacaatccatttactctcacttaggcgcctcgagttacttaagcatggacggtacttagagatcgacaaatgcatgaaaagattatttgaatattggatggaacatcataagaacatcataagcacaactagttcagttaaggtcaacatgagccaagtgtttgcagaactatccttaaatgtggttttgaagataatagttggaaagaccctttttattaaaaatggtaatgaagattacaccaaagaggaagaagaaggccaaaagctccacaagactatcctaaaattcatggaactagcgggggtatcagttgcatctgatgttcttccattccttgggtggttggatgtggatgggcaaaagaaacaaatgaagagggtctacaaggagatgaacttgattgcttcaaagtggcttggagaacatcgagagagaaaaagactgcaaataatacaaaaacgcggagcagcaagaggcagtaattatgatgatgggaatgacttcatggatgtgttgatgtcaattcttgatgaagaaaacgatgatctcttctttggttacagtcgagatactgtcatcaaatctacatgtctgcaacttatagtggccgcttcggatacaacgtcacttgcaatgacatgggctctctcactgctgctcaccaatcctaatgtcttacagaaggctcaggatgagcttgataccaaagttggcagggacagaataatagaggaacacgatatcgagtgtctcgtctacctccaagcaattgtcaaggaaacactccgattgtaccctcccgctccactctccctaccccatgaggctatggaagactgcactgttggtgggtaccaagtgaaagcaggcacacgcttagtagttaacctgtggaaactgcagcgtgatcctcgagtgtggtcaaacccgttggagtttaagccagagaggtttcttccacagtcagatggtggttttggtggtgaagaagcaagaatggacttcaggggacaacattttgagtacacgccatttggatcagggagaaggatatgcccaggtatcgactttttcctccagacagttcacatggcactagctcgtcttcttcaggcatttgatttcaacacagctggaggactagttatagacatggtggaaggtccaggtctaaccatgcccaaagtaaccccacttgaagttcacctaaacccacgtctgccggtcacactttactag

SEQ ID NO: 93 - DNA, 1677 bp, Papaver bracteatum
atgcaggtggattggccaaacatcttacagaagtactacccaataataacatgttcattattaactttgctatccttctattatatatgggtctccatcacaaaaccaagcaggaattcaaaaaccaaattaccgccacctgaagttgcaggttcatggcctatagtaggtcatcttccacagctagtaggatctacacctttgttcaaaatccttgctaacatgtctgacaaatatggacctatcttcatggtccggtttggtatgcacccaaccttagttgtgagtagttgggagatgtctaaggaatgcttcaccaccaatgacaagttcctcgccagtcgtccacctagtgcttcagccaagtacctcggttatgataacgccatgtttgttttctcagattatggtccttattggcgtgagatacggaagatctctactctccaattactcacacacaagagactcgattcgctgaagaatatcccttacttagagatcaacagctgcgtgaaaacgttatatacccgttgggcgaaaacccaaagccagataaagcaaaatgttggaggtgcagctgacgattttgttaaagtcgacatgacagaaatgtttggacatctaaacttaaatgtggtgttgaggcttgttgtaggaaagcctatttttatccagaaagacaatgctgatgaagactacacaaaggatggccataacaaagaggaattaggtcaaaagcttcacaagactatcatagagttctttgaattagcaggtgcttcagtcgcatctgatgttcttccatatcttgggtggcttgatgtagatggacaaaagaaacgcatgaagaagatagccatggagatggacttatttgctcaaaaatggcttgaagagcaccgacaaaaaggaatcaatcatgataatgagaatgacttcatggccgtgttgatatcagttcttggtgaaggaaaggatgaccacatcttcggttacagtcgggacactgtcataaaagccacatgtttgacacttatcgtagcggctacagacaccactttagtgtcattgacatgggctctctcactactactcaccaatcctagagtcttaagcaaggcgcaagatgagcttgacacagtagtcggcaaggaacgaaacgtagaagatcgagacgtcaatcacctggtctacctccaagcagtcatcaaggaaactctccggttgtaccctcctagcccactcgccgtaccccatgaggctattgaaaactgtaatgtgggcgggtatgaagtgaaagcaaggacacgtttattggttaacttgtggaaaattcatcgtgatcctagagtatggtcaaacccgttggagtttaagccagaaaggtttctcccaaaactggatggaggtactggtgaagcttctaagttggacttcaaaggtcaagattttgtgtatacaccattcggttcgggacgaaggatgtgcccagggatcaactttgccagtcagacgcttcacatgacgctagctcgcctactccatgcattcgattttgacattgagtcaaatggactagtaatagacatgacggaaggttcaggtttaaccatgcccaaagtaaccccactccaagttcaccttcgcccacgtctccctgccacactttactag

SEQ ID NO: 94 - DNA, 1716 bp, Papaver bracteatum
atgatggatctagcaatgttcatcgatcaatacttctcattagctaaaattgcaggcttattagctttgttatctttcttctattatctatggatctcaactttgtggtcgccaaggaatcccaaactatcatcagtatcaccacctgaagttgctggtgcatggcctatattaggccatcttcctcagctactaggatcaagacctctattcaaaatcctagcagacatgtctgacaattatggtccgatcttcatggtccggtttggtatgcatccgaccttggtggtaagcagttgggagatggctaaagagtgcttcaccaccaacgacaggttcctcgctggccgcccatcgggtgctgccaacaagtacctcacgttcgccctgtttgggttttccacatacggcccttactggcgagagatccgtaagatcgctaccctccatttactctcacataggcgtctcgagcttctcaagcatgttcctgacttggaggtcaccaactgcatgaaacacttgcatcgacgctggatagacagtcaaaaccaaataaaacaaaatgacgctgcagctggttcagtaaaagttgacatgggcagagtatttggcgagctaaccttgaatgtggtgttgaagttagttgctggaaaatcaatttttttcaagaacgacaacactcgtcaatatgactccaaggatggtcataacaaagaggaggaagaaggtaaaaagctccataagaccatcatagatttctactcattagcaggagcttcggttgcatctgatgttcttccatttcttgggtggttggatgtggatggacaaaagaaacgcatgaaaagggtagccaaggatatggatttcatcgctgcaaagtggcttgaagagcaccggcatcaaaaaagacaaacagtactatcaagctcagcaacactaggcagcagtaatcatgacgatgcgaaagatttcatggacgtgttgatgtcaattcttgatggggaaaatgatgatctcttctttggttacagccgtgacactgtaatcaaaaccacatgtctgcaacttatagcagctgccgcagataccacatcagttacgatgacatgggctctcgcactactaattactaatccgaccatattaagaaaggctcaggatgagcttgataccaaagtaggcaaggacagaaacatagaggaacgcgacatcaatgatcttgtctacctccaagcaattgttaaggagacactccggatgtaccctgctggcccactcaacgtaccccacgaggctatcgcagactgcaatattggtgggtatgaagtgagagcaggcacccgtttgttggtaaacctatggaaaatgcaccgcgatcctcgagtatggtcaaatccgtcagagttcaagccagagaggttccttccacaactggatggtggatctggtggtgaggcggcaaacttggacttcaggggtcaagactttgagtatctaccttttagtgcaggaaggaggatgtgtccagggatcgacttttccctccaaacgcttcatatgactcttgcgcgcctgcttcatgggttcgatttcaacaatgactcggcaggaataataatagacatggaggaaggttcaggtttaactatgcccaagttaacaccactagagatttacctctgcccacgccttccagccaaactctactag

SEQ ID NO: 95 - DNA, 1632 bp, Sanguinaria canadensis
atggagtttctttctctacaattccaaccgattaccatttttgcccttcttcttgccactcccatttttctgtacaatctctggaattatggaaggaaactcaacaacaagaacaagaagagcagaaaaccaccagcacctgaagcatcaggtggatggccgatcatgggtcattttcatcttttcaatggaaccgaggtgactcaccgagctctcggttccatggcggacaaatacggtccagctttcaatatccgaatcggttctcatccaacacttgttgtgagtagttgggagatcgctaaggaatgtttcaccacaaacgaccgactcttctcaaataggccaggttctttagcgattaaactcatgttctacgatgccgattcggttggttatgcaccgtacggaacttactggagagagttgagaaagatttcaactctaaaacttctttcaaatcacagattggaaacgcttaaacatttgagaacatctgaagttgaatcctgttttaagcagcttcatgatttgtggcggatgaacaataaaaagggggggagcgatgatggatcagattttgctctggtgaggatagataattggtttggtgatttgacttttaatgttgtggcgagaattgttgccgggaaaaagaattttgcgggaggtgcggcgagtggtgatgccggagctcaaagatataaggaagccatggatgaagcgtttcgtttgatgacgaggtttgcgttctcagatgttgttccatcgcttggatggttagataaattgacaggacttgttggaggaatgaaacgttgtggatctgaaattgattcgatcgttgcaagttgggtggatgaacatcggttgaaaagaatttctggaaaagaaggggatgatcttgaacaggatttcatcgatgtttgcttagagattttggagcattctactttgcctggcgatgatcctgaagttgtcatcaaatctacttgcctggacatgatattgggtgggagtgacaccacaacagtgaccctaacatgggccctctccttactattggaccatccccacgtgtggaaaagggcgaaggaggaagtggatgcacacgtgggaaaggagagacaggtggaggactcagatatccctaatcttgtgttcatccaagcaatcgtcaaagagacgatgagattgtacccagctggaccactgatcgagcggaggacaatggatgattgtgaggtaggtgggttccacataccaggtggcacacgtttaattgtgaatttatggaagattcaaagagacgggagcgtgtacaaggaggatccattggagtttagaccagagaggttcctgacgagcaacgcggaggtggatctaaagggacagaattacgaactgataccatttggtgctggaaggaggatatgtcctggagtgtcgttcgcagtgcaattgatgcatttggtactggctcgtctcattcacgacttcgaaataacgatgcccatgggtgcgaaagtagacatgactgagagtggaggactaatcagccacaaggtgacgccgctggaagtgctgctcaaaccacgcctcccctcgctccaacaagcagctttatattaa

SEQ ID NO: 96 - DNA, 1578 bp, Sanguinaria canadensis
atggaatattcctcagtacttctccattggttccctgcttccatggctgcccttcttgccttggtttttctgtacaatctcatctttaattccccaaaaaccggtaataagaagattataaggagggcacccaaagcagccggtgcatggccagtccttggtcacctccatttgtttggatcaggtgagctgcctcacaaaatgctcgcagccatggcagaaaaatacggccccgccttcacaatgaaattcggtaagcacacgacactagttgtgagtgacacccgcgtcgtaaaagaatgtttcaccaccaatgacaccctctttgccaaccgtccatccaccaaagcctttgatctcatgacttacgccaacgactcggtagccttcacaccttacagtccttattggcgcgagcttagaaagatatccactctcaaacttctctctaaccaccgcctccaatcgatcaaggaagtccgagtctccgaggtgagcgtatgttttagggagctatacgatatatgcaaaaatgatggaggaggagctcctccagttttggtggatatgaagaaatggttcgaagaggtctcgaacaacatagtgatgagggtaatcgtagggaaacaaaattttgggtcgaagattgtttgtggcgaagaggaagccgtcaattacaagaacgtcatggatgagctcctacgtcttgctagtgtgtctatgttatcggatgtggcacctttacttggttggttggatatgttccaaggacacatgagcgccatgagacgaaatgggaaaaaactagacaccatacttgagaggtggttggaggagcatcggaagaagaagagtgaggatgagcaagatttcatggatgttatgttgtcgatcgttgaggagactaagttgtctggccgcgacgctgataccgtcattaaagctacttgtctggccatgatcatgggtgggacagacaccacggctgtgagtctaacatggatcgtttccttattgatgaacaatcgctatgcattgaaaaaggctcgagaagaattggacgcgctcgtggggaaagatagacaagttgaagattcagatttgaagaatttggtgtacttgaatgccgtcgtcaaggaaacgatgcgattatacccgttgggtactcttcttgaacgtgacaccaaagaagattgtgaggttggtgggttccatgtggaaggcggtacgcgtttactagtgaatgtatggaagttacaacgagacccaaacgtgtggaatgatccattagaatttagaccagagagatttctaacagagaatgcggatatagatgtcggaggccaacatttcgaattactaccatttggggcagggagaagggtgtgcccaggagtgtcgttcgcactccaattcatgcatttggtattggctcgtctcatccatggctatgaattgggaacccaaaatgatgaggatgtggatctaactgagagcacagaaggacatgttaaccacaaagcctccccgctcgatctcctcatcaccccacgcctccaccctaaactttatgaataa

SEQ ID NO: 97 - DNA, 1584 bp, Sanguinaria canadensis
atggattattcatcccatttgaaccagttctacggggtagctccatacatggctgccctactaattgccttagtgtttctctacaatattctttgggcttccccaaaaaccaccaacaagaaaccaatcatggcagccggggcatggccaattctaggccacctccatctgtttaaagatggggaattgcctcaccacatgcttaaatccatgtctgataaatacggccctgccttcctcatgaagttcggccaacaccgaacactcgttgtgagcaactaccgcatggtaaaagaatgtttcactactaatgacacccacttttgcaaccgtccatccaccacagccttcgatgtcatgacttacgctaatgactccgtcgctttcacagcttacagcccttactggcgtgagcttagaaagatttccactctcaaacttctctctaacaaccgtctccaggccatcaagaacctccgagaagccgaggtgaacgtatctttcagggggttgtatgatttatggaagaataatagtgatcgagctgcgtcggttttggtcgatatgaagaaatggtttgaagaggtctcaaacaacgtcgtgattagggtgatcgtggggaaacataattttgggactaagattgtgaagggtgagaaggaggctgtggaatacaagacgatcatggatgagctcttacgtcttgctagtttgtctttgttatctgattttgctcctatacttggttgggtggacttctttcaaggaaacgttcgaaaaatgaaacgaaatggcaagaaactagacgtggtacttcagaggtggttggagacgcatcggaggaagaagaactcaccagaggatgaacaagacttcatggatgttatgttgtcgatcgttgaggagggcgacaagttgtctggccaccacgctgatactgtcattaaagctacttgcttggccatgataatgggtgggacagacacgtccgcagtgagtctaacatggatcgtctccttactgatgaacaatcgtcatgcattgaaaaaggctcgtgaagaattggatatgtacgttgggaaggataggcaagtagaggattcagatttaaaggacttggtttacttgcatgcaatcgttaaagaaaccatgcgactgtacccactgggtactcttcttgaacgcgagaccaaagaagattgtaaggttggtgggttccacgtcgaagccggtacgcgtttactagtgaacatatggatggtacaacgagacccaaccgtgtggagtgatccaacaaaatttataccagagaggtttctaacagagaaggcggacatagatgttgggggtcagcatttcgaactcataccattcggggccggtagacgggtgtgccctgccgtgtcctttgcactccaatttcttcacttgatactggctcgtctcatccatggatatgaattaggaaccccaaatgacgcggatgtcgacttaaccgagagcccggaaggacatgttaaccacaaagcatcccctctcgaactcctcctcaccccacgcctcgaccctaagctctatatatga

SEQ ID NO: 98 - DNA, 1608 bp, Sanguinaria canadensis
atgaattcaatcgcagtcgtcggtgttcttcttttcttcctctactatctatggaggacactattcaccactcacaaagcggcgccaccaccacaaccagccggagcaaggcctattataggtcacctacatctcctcggtggagcgaatcaactagtccatcaaacactcggttccatggcagacaagtacggatcaattttcatgatccgactcgggatgcgacgagtcctcgtggtgagtagctccgagttagctaaagaatgtttcactacgaacgacaaggttttcctcaaccgcccaagttcattagctttaaagctgatggcctacaacaacgccatctttggttttgcaccttttggtccttactggcgtaagatgcgcaagatagcagtcaccgaacttctatccaacagacgcctcgagatactaaaaaacatcaggatctccgagatcaacatgtctataaaagaattacatcaactatgggtagatatgaacagtggtgatgatcaagtggggggcccaccaattgtggtggaaatgagaaagtggtttggggatttatcgttcaacgtggtgggtagaatgatagctgggaaaagatattttgggaggaattgtgattgtgatgaagaagaaacgaggaggtatcagaaggcgatgggtgattttatgcatttagtgggggtttttgtggtgtcggatgcgattccgttattagggtttttggatttacagggatatgagaagaagatgaaaaggacggccatggacattgattgtgttttagggagatgggttgatgaacatcgacgacgacgacaagaccacgatgagaagaggattatggtctccgatgatgatcatcaaggacaagatttcattgatgtgatgctatcgatcttaaatgatgatgatcagttctacggttacgatgctgatacagttatcaagtctacctgcctgtctcttatcgcaggcggccacgagaccacggcggtcacactaacatgggccctctctttactactaaacaatcgacacgtgttacaaaacgcgcaagatgagttggacatccacatcagcaaggaaagacaagtggacgaatcagatatcaagaacctgaaatacctccaagccatagtcaaggaagcattgcgtttatacccagctttaccactttcagcactaagattggccatggaggactgcaccatagctggatttcatgtccctaaaggcacagaattgatgcttaatctatggaaattacatcgagaccctcacgtttggtctgaccctttggagttcaagccagaaaggtttcttactaatagcacccatgaagaagttgacgttgggggtcaacattacgaattactaccatttgggtctggtagacggatgtgccctggggtatcgtttgctcttcaagtcctgcacttgacgcttgctcgtctacttcatggatttcatttgtcgactccgtccggtgtacctgtggatatgactcaaagttttggccttagttgcccaaaagcaactcccttggatgtcctccttacaccacgtctcccttcaaagctatattatgtagcataa

SEQ ID NO: 99 - DNA, 1806 bp, Sanguinaria canadensis
atgatttcaactacgccggacgtactagctacctcatcatattcatcatctaacaagcatatggattcagatcatctttaccggttctcaactagtactagtatagttattggcctctttattttactattcttccttgtgctcctatggaaaccaaagaagcagtctgctacttctaagactaacaaaccaactagagagcagcgggcaccggaaccttctagttcatggcccataatcggtcatctccgtctcttcggaggaccaaatagccttccccacataacattgggagctatggctgataagtatggaccagtcttcaccatccgaatgggttcgcgtccagtgcttgttgtgagtagttgggagacggcgaaagaatgtttcaccaccaacgacagggtcttcgcctctcgtccacgcactatagccattaaacatatgtgttatgaacatgtcatgcttgggttcgccccttacggatcatactggcgggaattgcgcaagatagtgaaccgagagcttctttcgaataatcggctagagttgttaaaacatgtatggggatctgagattaacacatccattaaagaactgtatgagttgtggttggtgaacaaaaacaacattgaagcagaaggtgaaaatgaaggtacaagtgatagggttttggtggagatggagagatggtttgcggatttgactctaaacatgtctattaagattgttgttgggaagcgatacccctccggtgttactgccggtggtagttctggttgtgatgatgatgaagctcagaggtgccggaaggccctgagagatttctttaagctggtgggtctgtttttggtgtcggatgcgatcccctttctaaggtggttggacttgggtggttatgaaagagagatgaagactactgcaagagagttggactgtttaatggaggaatggttggaagaacataaaatgaagaggagattattaatttcaccgtcggcaggtgatcatcatgaagctgcagagatcatgatcaataagcagaaggaagcagagctacaggaatatgacttcatggacgtgatgctatccatacttgatgacgatattgagggtaaaaacctttcagattacgacgtcaatgccgacactatcaacaagtctacttgcctgaatctaatcctaggtgggagcgacacaacaatggttactttaacatgggccctcgctttactactaaataatccacacgtgttacaaaaggcccaagatgagttggatatccacgtaggcagcaagagacaagtggacgattcagatatgaagaacctcatatacctccaagctatagttaaggaaacaatgcgcctatacccagcaggtccactatcagtaccacacgaatcaactgaagactgcaccgtagctggctaccacgtccctgcagggacccgtcttattgtaaatacctggaagatccaacgtgacccacgggtatggtccaacccatcagaattcaaaccagagagatttctcacagacagtcacgtggacatagatgttagaggtcggaattttgaattgatcccttttgggtcgggcaggaggtcgtgcccgggtacctcatttgcactccaagtggtgcacctggtactggcccgtttgatacatgggttcgagtttaaaacaccgtcggaagcacccattgatatgacggagagcgtaggcctaagtaattttaaagccaccccacttgatgttctgctcaccccacgtctcccttctcagctttattatgtttcttag

SEQ ID NO: 100 - DNA, 1578 bp, Sanguinaria canadensis
atggattctactttggttttcattggcctctttgctttactactagtctaccccttactactaagaagatcagtattgaagtctacttcaaatactaataagactacttataaatcgaaaaaccaagcaccggaggcggccggggcgtggccgataatcggtaatcttcatcaactcgcgggtggaggaaactgtctccataaaacgttgggagccatggctgacaagcacggaccggctttcaccatccggatgggtctacataaagcacttgtggtgagtagttgggagctagcgaaagagtgtttcactaccaacgacgtggttttcatgtcccggccgcatcaagtagccattaaacacatgggttacagcaccgccatgtttggaatcgctccttatggcccatactatcgcgaaatgagaaagatagtgactcaagagcttctctctaaccgccgcctagagttgctaaaacatgtatgggcctctgaaatcaacaactccattaaacaactctacgagaaagtcgaaggcggaccagttttgatcgaaatgaagcgatggtttgcggatttaacgctaagaacgacggttaaggtgatttgtggacagcaacaatttggaggagatgatgatgatgatgaagctggaaggtttcaaacggcgctgagagacttctttaggttgttaggtcactttcgagtggcggatgtgatacctgttctagagtggctcgattttcagggatacaagaaagagatggagaataatggaagagtgcttgataatttaatgaataaatggttggaagaacataaaaggaagaggaagaacggtggcaccgaagaggacttcatgaacgtgatgatatccaaactgcttgatgatacaaagatgctttcctattacgacgccgatactatcaacaaatctacttgcctgacactaatcctgggtgggagtgacacaaccatggttagtttaacgtgggccctttctttactagtgaatcatccacatgtgttgaaaaaggcccaagaagagttggatgtccacgtaggcaaagaaagacaggtagacgattcagatctctggagcctcacataccttcaggctattatcaaggaaacattgcgactatacccacctggtccactctcagctccacgcgaatcaacggacaactgcaccatagctggctaccacgtccctgcaggaacccgtctaatagtgaatacctggaagattcaacgtgacccacgggtatggcccgacccattagagttcaagccagagagatttctcaccacccatgtggacgtggacgttaaaggtcagaatttcgaactcctaccattcgggtcgggtagaagagcatgcccaggtgcctcattcgcgcttcgggtgctgcgcctgtcactggctcgtttgatacatgggttcgactttaaaacaccattggacgactcacccattgatatggtggagagtggaggaataactaatgttaaagacaccccacttgaagtactagtcaccccacgcctcccttctagtctttatgtttgcaaatag

SEQ ID NO: 101 - DNA, 1599 bp, Sanguinaria canadensis
atggattttgatctttaccaattctcaaaacctactatcttcattggaggcctctttgctatacttctctactttgtactcaaaaaatctagtactcccaaatccaaatcaaaattagaacaaccacccgaaccggctggcgcgtggccgatcatcggtcatcttcctctcctcggaggacccgatctccctcacataacattaggaaaattggctgataaatatggaccagccttcaccatccgaatcggtgttcataaagcggtggttattaatagttgggaggtggcgaaagagtgtttcaccaccaacgacaaggcgttttcttcccgtccgcgtcaagtagccatgaaacacatgggttacgattacgccatgtttgggttcgccccttacggaaattactggcgtgaactccgtaaaattgtgaaccgagaggttctgtctcatagtcggatcgagtctttatatcacgtatggggtactgagatcaacacgtccgttaaagaactgtacgagttgtgggggaagaaaagcaccggcagcggcggtgcaccggtcttggtggaaatgaaacgatggttctccgacatgacactcaacatgtctgttatgatggttgcaggtaagagatacaactttagtggcaacaaagctgacgatgaagctgggaggtgccaagatgggctgaggaacttctttcggttagtcggtctgttcgtgccatccgacgcgttgccgtttttggcgtggttggacattggtgggtacgagaaagaaatgaagaaagtagcgaaagagcttgatgttttagtgcaggaatggttggaagaacacaaagagaagaggttggcattgacggccgcggggaagaaaggaagcgaaaacgatttcatggacgtgatgatgaatatacttgaagatcaaaaactatcagaattcgatgcagatactatcaacaaggctacttgtctgactttaatcctcggtggaaccgatacaaatatggttaacttagtgtgggccctgactttactggttaacaatcaagatgcgttgaagaaagctcatgatgagttggacttccacgtaggcaaagatagacaagttgaagaatcagatgtaaagaacctcgtgtacatccaggctataatgaaggaaacactgcgtctatactcgggcccactgtcgggcttacgcgaatctacggaggactgcaccgtagctggttactacgtcccagcagggacccgtttgattattaatgcagcgaagattcatcgtgacccacgggtatggtctgacccaacagctttcaaaccggatagattcctcacggaacagaaagaaatggatgttagaggtcaggatttcgaaatccttccattcggggcgggtagaagaatatgcccgggtgtgtcattcgcacttcaagtattgccattggcactggctcgattaatacatgggttcgactttaaaacacccacggatgcacccattgatatgacagaaagtccaggactaactaatgctaaatccaccccactcgaagttctagtctcaccccgcctcacttctaaactttatggttgttaa

SEQ ID NO: 102 - DNA, 1668 bp, Sanguinaria canadensis
atggattctattctaaaccagttcatctcaaaacctactatggttatttgcagcctctttgctttactatccctctactttctactgatcaaaaggtctaccactaaatcaaaattacaactgccacccgagccggcgggtgcgtggcctgtcatcggtcatctccatcagttgggtggacctaacttaccccacataacattagcagccatggctgataagtatggaccaatcttcaccatgaaaattggtacgtatcgagcactcgtagtgagtagtccggaggtagcgaaagagattttcaccacccacgataggatatgggcaacccgaccaaatcaagcagccatgaaacacttgggttacgactcggccatgtttgggttcgcaccttatggaccatactggcgtgaacttcgcaagttagtgaaccgagaacttctctctaatactcggctcgatttgctacatcatgtgtgggattctgagattaacacttccattaaagaactgtacgattcgttagcgaccaaaaacaatgcaaaaggccgtggtactggcggcgccggtagtactggtcctgttttggtggaaatgaaacggtggttcgcggatttgacgctaaacataactgttaggatggttgctgggaaacgatactttggtgctaataaaacttctagtactagtactgatcaatgtgataatgaaaaaggagatagtaaagcatggaagtgccaaagggagctgagaaacttctttaggttggtaggtctgtttgtagtgtcggacgcgttaccgtttcttgggtggttggatttgggtggtcacgagagagagatgaagaatactgcaagagagttggatgttttagttcaaggatggttggatgaacataagaggaagagatcattatccgtggctgaaggcggggagaagatcaacggcgaacaggacttcatggacatgatgctgtccacaatcgacgacgctaagttatctggttatttcgacgctgatactatcaacaagtctacttgtctgaatctaatcctgggtgggagtgacacaatgatggttaatctaatttggcccctcacgttactggtgaactatccagacgagttgaagaaggtttatgatgagctggacacccacgtaggcagagatagacaagtggacgaatcagatatcaagaatctcgtgcacctcaaggctgtaatcaaggaaacaatgcgtctatacacgggtcggatcacaggcctccgccaatcatcagaggattgtaccgtggcagggtaccacgtaccagcaggtacccgcctgattgtaaacacgtggaagattagccgagacccacggtactggtccgacccgttagagttcaagccagagagatttctcacgacccatgcggatatcgagcttacaggtcagaattttgaactaatcccgtttgggtcgggcagaagatcatgcccgggtgcctcatttgcaattcaattgctgcacctggcactggctcgtctggtacatgggttctggtttgaaaggccgtcggatgcacccattgatacatcagagtgtcctggactaactaattttaaagccaccccacttgaagttctggccaccccacgcctcccttctaaactctatgttggttaa

SEQ ID NO: 103 - DNA, 1617 bp, Sanguinaria canadensis
atggattttattctgaaccagttcatctcaaaacctactatggttcttggcaccctctttgcattactatccctctactttctactgatcaaaaggtctaccactaaatcaaaattacaactaccacccgaaccggctggtgcgttgcccatcatcggtcatctccatctcctcggtggaccaaacccgccccatataacattagcaaacatggctgagaagtacggaccgatcttcagtatcaagatgggtttaaaacgagcactcatagtgagtagttcggaagtaaccaaggagtgtttcactacccatgacttgaatttcgtctctcgaccacgtcatgcggctatgaaactcatgggttataatttcgctacgtttgggttcgcgccttatggaccttattggcgcgaacttcgtatgataattaaccgagaacttctctctcaaactcggatcttgtcgttagaacatgtatggggttctgagatcaatgaatccattaaggaactgtatgatttgttgacgagaaaaggtggtggtggtggtggtccggtggtggtggaaatgaagcgatggtttgcggatttgaccttaaatatagccgttaagatggtgtgtgggaagcgatacttcggtgttaattctcctagcactagtacgactcgtgatgttcaagaagatgatgaagctcggaggtgccaaaaggggatgagaaatttctttaggttgcttggtcagtttgtggtgtccgactcgataccgtttctggggtggttggatttgggtggttaccagagggagatgaagaataccgccagagagctcgacgatttaatgcagggatggctggaagaacataagaagaagagattggaaaggaagacggccgcaggggaacaagacttcatggacgtgatgctgaacatacttgaagatggaaagctatctcaatatttcgacactgatactatcaacaagtctacttgcctgagtctaatcctgggcgggagtgacacaacgatggttaatttagtgtgggccttcagtttactggtgaaacatcaagatgcgttgaagaaaactcgtgatgagttggacatccacgtaggcagagaaagacaagtggaggaatcagatatcaagaatctggtattcctccaggctgtagtcaaggaaacatttcgtctatacgctggcccaatctcaggagtacgggaagcagcggaggactgcaccatagcaggctaccacgtcccagcagggacccgtctacttataaatagctggaagattcaccgtgacccacgggtatggtccgacccattagagttccacccagaaagatatctcgaggcgaggcatgcggacattgacgttaaaggtcagaatttcgaactcgccccattcggaatgggtcgaagagtttgcccgggttccgcatttggactgcaagtattgcacctgacactggcccgtttgatacatgggttcgagtttaaaacaccgtcagacgcacccgtggatatgacggagagtgtaggaatgagtattattaaagccaccccacttgaagttctcgtcacaccacgcctcccttctgaactatacgtctaa

SEQ ID NO: 104 - DNA, 1602 bp, Sanguinaria canadensis
atggatatttctaatctttacgagttatactatttctccacacctactctgtttgtcggaggcctctttgttttattactcatctactctctattctcatccaggcctggaattaaatcaaaattacaacagccacctgaaccggccggtgcatggcctctcatcggtcatcttcctgtcttaagtggaccggaactaccccatgtcgcattgggaaagttggctgacaagtacggaccagtcttcaccattcgtatgggtgttcataaatcacttgttgttagtgattgggaggtaattaaagagtgtttcactacccacgacaaggtcttctcgtctcgtccttgtcaagttgctatgaaactcatgggtacggccatgtttggcttctccccttacggaaattattggcgtgaacttcgcaagatcatgaacagagaggttctatctcatggtcggatcgaatctctttaccatgtatggggttctgagatcaatacgtccgttaaagaactttacgatttgtgggcgaagaaaaacaatggtggtggtccaattttggtggaaatgaagcgatggttctccgatttaacgcttaacatgtcggttatgatggccgctggaaagcgatataattttggtgatgattcttctactactaatgatgaagcggcgaggtgccaacatgcgctgagagagttttttaggttggtgggtttgtttgtgccatcggacgccttaccgtatcttgggtggttggacataggtgggtaccaaaaacaaatgaagaaagtagcaagagaattggatgatttaatgcaggtatggttggatgaacataaaaagaagaggttagcagcgaaagccgaagggaagaagggaggcgaacaagacttcatggacgtgatgatgactatacttgaggacggaaagctatctgattattacgacgctgatactatcaacaaggctacttgcttgactctaatcctgggtgggaccgacacaaacatgcttagtttagtgtggaccctggctttactgatgaataatcgacaagccttaaagaaggttcatgaagagttggatatccacgtaggcagggaaagacaagtggaagaatcagatatcaagaacctcgtatacctccaggctgtaatcaaggaagaaatgcgtctatactcgggcccactttcaggtctacgcgaaacaacggaggactgcaccatagctgggtaccacatcccagcggggacccgtttgattataaatgcatcgaagctccaccgtgatcctaaggtatggtccgacccgttagagttcaagccagagagatttcttacggaaaacgtgggcgtggatgttagaggtcagaatttggaactccaaccattcggggcgggtagaagaatctgcccgggtgtctcatttgcacttcaagttttgcccctgacgttggcccgtttgatacatgggttcgagttgaatacacctggggatgcacccattgatatgacggagtctccaggactacaaaatgctaaactcaccccacttgaagttttaatcacaccccgactcccttctaaactatatgtttaa

SEQ ID NO: 105 - DNA, 1608 bp, Sanguinaria canadensis
atgattgttattggcgccttccttgctttagtggtactagtggtctactataatctactactaagaaggccagcattattgaaatttaaaaacatgaagcagcaggcaccagaagcggccagtgcgtggccaataattggtcatctccataatctcgcgggtggcataggcggaaacggcctactccacgaaaagttgggagcaatggctgacaagcacggaccggctttcatcattcgcttggggctgcataaagcactggtggttagtagttgggaggtagtgaaagagtgtttcactacaaacgacgttgccctcatttcccgcccgcatcaagtagcttctaaacacatgggttacggcatggccatgtttgcgttcgcctcgccttatggaccatactggcgcgaattgcgtaagattgtgaagcaagaacttctctctaatagccggcttgagttgctaaaacatgtatgggcgtccgagatcaacacctctattaaacaactctacgagaaagttaaagaaggtggtggtttgccggttttggttgaaatgaagggatggttcgcggatttaaccctaaaaatgacggtaaaggtgatttgtgggaagcgacactttcgagttgcgggtaatgtaggagatcatgttgatgctgatgacgatgatgaagtaattggtgggcgatttgaaaaggcgctgagagacttttttaggttgttaggagatattcgagtggtggacgtgttaccgtttcttcggtggttggattttggcgttggttataagaaagagatggagaataatggaagagtgctggatattttaatggaggaatggttgcaagaacataaaaggaagaggatgaacggcggcaccgaagaggacttcatgaacgtgatgatatccaaattacttaatgatacaaagctgctttcctattacgatgctgatactatcaacaaatctacttgcctgactttaatcctgggtgccagcgacacaactatggttactttaacgtgggccctctctttactagtgaatcatccacaagtgctaaaaagggcccaggacgagttggatgtccacgtaggcagggaaagacaggtggaagattcagatatccagaacctcacataccttcaggctataatcaaggaaacattgcgaatatgcccaccgggtccgattcaagctccacacgaagccaaggacgactgcaccgtagctggctaccacgtccctgcagggacccgtcttatagtaaatacctggaagatccaacgtgacccacgggtatggcccaacccgtcagagttcaagccagagagatttctcacgacccatgtgggcgtggacgttagaggtcataatttcgaactcatacctttcgggtcgggtagaagatcgtgcccagggacctcgttcgcactccaagttgtgcatctgacactggctcgtttcatacatggatttgagtttaaaacaccgtcggacgcacccattgatatgacggagagtggacgaataactaatgttaaagccaccccacttgaagttctagtcaccccacgcatcccgccgtctggtctttatgtttaa

SEQ ID NO: 106 - DNA, 1719 bp, Sanguinaria canadensis
atggatttgctgatcttctccagccagttgcaaggtactgtggggttattagctttactaaccttttcctattatgtatggattttaattataaagaggatcaaaacaaccaacaccttgaaggtcatgaataaagtggcggccgcggcggcaccggaagttgccggtgcatggcccatagtgggtcatcttcctcagctagttggccctcaacagctttacaggattcttggagacatggccgacgagtatggaccgatcttcatggtccggtttgggatgtacccaactctggttgtgagcagttgggagatgataaaggagtgcttcactaccaacgacaggttcctcgctagtcgtccctctagtgctgctgggaagtacctcacttacgacttcgctatgttcggcttctccttttatggtccctattggcgtgagatccgtaagatctctactctcgaactactctcccatcgacgccttgagttgtttaagaacgtccctttcactgagatcgacacctgcatcaaaagattgtaccaactttggcgggttaaaaataatgatcatccagctgctgctccggtaattaaggtcgacatgagccaattgttgagagatctaaccttaaatacaatattgaagttggtggtaggaaagaatttattcaacgagaaggatcatggtgaacaggaagagggtcgaaagctccacctccacaagacgatagttgaattctttaaactggcaggggtttcagttgcatcggatgctcttccgttcctagggtggctggatctggatggacagaagaaaaagatgaagaggatagccaaggaaatagacttaatcgctgaaagatggcttcaagagcatcaagagaagaaatcactatcaaacaagaagctgctggctgctggcggcggcaaagtagacggtcatgacgacttcatggacgtgttgttattcattcttgacgatgattcccagttcttcaatttcagtcgcgacactgtcattaaagccacctcttgggcaatgatcctaacagccgcggacaccacatccgtgtctatgacatgggctctgacgctactactcaccaatccccgtgtcttaagaaaggcccaagatgagctggatatgaaagtcggcagagacagacacgtggaagaacgagatatcgagaacctgatctacctccaagccatcgtcaaggaaacattgcgtttgtacccggctgctccacttggagtacctcacgaggctatccaagactgcaccgtagctgggtatcaggtaagagcaggcacacgtgtgttagtgaacctatggaagctgcatcgcgacccacgtgtgtggtcgaacccatccgaattcaggccggagaggtttctaatcgacgatattgacgagcaaggtggtggtggtggtggtggtggcggtgaatcaacagctaaggatttcagaggtcaacattttgagtacataccatttgggtcaggacgaaggatgtgtcccgggatcaacttcgcccttcagatcgttcacatgacactggcacgcctacttcatgcattcgagttgaggactactacgtccgcatcactaatggacatgaccgaagaatcaggcctcaccatgcccaagaaaaccccacttgtagtcctcctccaaccacgcctccctcttccactttatgatcaccatgagtga

SEQ ID NO: 107 - DNA, 1602 bp, Stylophorum diphyllum
atggagtttctctctctacaacaccaactaatttccatttttgctcttcttcttgcttccatattcctctacaatctcttgaagaatcatggaaggaaatccaagacctcaaaaccaccagcacctgaagcatcaggtggatggccaatcatgggtcatctcaatctcttcaatggaagcgaattaactcaccaagctctaggttccatggctgacaaatacggtccagctttcaatatccgattcggttctcatcaaacactcgttgtcagtagctcggagattgttaaagaatgtttcactacaaacgatcgattcttttcaaatcggccgggatcgttagcgattaaactcatgttctacaacgctgattcagttggttacgcaccgtacggtgcttattggagagatctcagaaaaatctcaaccttaaaactcctttcgaatcatcgactggaaaccctaaaacatttgagaacttctgaagttgagtcctgttttaaacaactttataatcaatggaagaacaacaaagttggcggcgaccatgattttgctctggtgaggatggataattggtttggagacttgacatttaacgttgtggcaagaattgtcgctggaaaaaagaattttgctggaggtgcgacgaatggcgacgtcggagctcagagatataaggaagctatggatgaagcgttccggttgatgacgatttttgcgttctcagatgtggttccgtctttgggatggttggataaattgagaggtttggttggagggatgaagcgttgtggtgcggaaattgattccattgttgcgggttgggtggatgaacatagattgaagagagcttctggaaagggaggaggtcatactgatcttgaacaagattttattgatgtttgcttggagattatggaacattctactttgcctggtgatgatcctgaaattgtcatcaaatctacttgtctggacatgattttgggtgggagtgacacaacaacggtgaccctaacatgggcactctccttactattgaacaatcctcacgtgttgaaaagggctagggaggaattggatacacatgtgggaaaggacagacaagtagacgactccgatatgtctaatcttgtgtacatccaggcgatcatcaaagagacgatgagattgtacccagcaggaccactgatcgagcgaaggacatcggaggattgtgaggtaggtgggttccatgtaccggcgggcacacgcttattggtgaacttatggaagatgcaacgagatgggagtgtgtataaggaggatccattagagtttagaccagagagattcttgactagcaatgctgatgttgatctaaagggacagaattatgaactgataccatttggtgcgggtaggaggatatgtcccggtgtgtcgtttgcggtgcagttaatgcatttggtgctggctcgtctcgttcatggctttgaaatgaagacggccggagatgcgaaggttgacatgacagaaagtgcaggactaattagccacaaggttacaccgctagaagtgctgctcaaaccatgccttgcgattcaacaagctttataa

SEQ ID NO: 108 - DNA, 1602 bp, Stylophorum diphyllum
atggattcttttcttctaatccagtggtttgcagcttccatggctgctctacttgcttttgtttttctctacaatcttgtctggagttcttcaagaactacaaagggtaagaatattagaaaggcacccatggcggccggtgcatggccgattcttggtcacctacatctgtttggatccggtgagctgcctcacaaaatgctctctaccatggctgagaagtacggtcccgctttcaccatgaagtttggtaagcacacaacactagttgtgagtgacacccgtatcgtaaaagaatgttttactacccacgataccctctttgctaaccgtccttcgactactgcatttgatctcatgacttatgctaatgactcggtagccttcacaccttatggtccttattggagggaacttaggaagatatccaccctcaagcttctctctaaccaccgcctccaatctatcaaggaaattcgagtatcagaggtgaacgtatgttttagggagctatatgaatcatgcaagagtaaaactgatgcaactccggttttggtggatatgaagaaatggttcgaagaggtctcgaacaacatagtcatgagggtaatagtggggagacagaattttggttctaagattgtgcaaggcgaagacgaggccgtcaattacaagaaagtaatggatgaactcttacgtctcgctagtttgtctatgttatccgatgtggcccctgtacttggctggttggatatgttccaaggaaacaagagcgccatgaaacgaaatgccaaaaaagtagacaccatacttgagggctggttggaggagcataggatgaagaagagcgcatcaggaatctcttctgctggtgagaatgaccaggacttcatggatgttatgttgtccatcattgaggagaccaagttgtctggccgcgatgcggataccgttattaaagctacttgcttggccatgatcatgggtggtacagacaccactgccgtgagtctaacatggattgtctctttactaatgaaccatcgccatgtactgaagaaggcccgagaagaattggacgccctcgttggtaaggatagacaagttgaagattcagatttgaagaacttggtatacatgaatgccatagtcaaagaaacgatgcgaatgtacccactgggtgctatgctcgagcgagaaaccaaggaggattgtgaggttggtgggttccaagtccaaggcggcacacgattactagtgaatgtgtggaagctacaacgagacccaaacgtttggaccgatccaacagaattcaaaccagagagatttctaaacgaaaatgcggatatagacgttgggggtcaacatttcgagctactaccatttggagctggtaggagggcgtgcccgggtgtgtcgttcgcactccaattcatgcatttggtactggctcgtctcatccatggatatgaattgggaactcagaatgatgcggacgttgacttaactgagagcacagaaggacatgttaaccacaaagcttcccctctcgatctcctccttaccccacgcctcaacaaccctaatctgtatgattattag

SEQ ID NO: 109 - DNA, 1707 bp, Stylophorum diphyllum
atgactataggggctctagctttactatctttcatctattttttacgggtttcagttattaagaggaccaaatacaccaacaccgcggtcaccgccaccaacaagttggaaaatgatgaagatgaggccaatcatagtaagcgagtggttgcaccacccgaagtcgccggtgcatggccaatattgggtcatcttcctcagctagtgggactaaagcagccactgttcagggtactaggagacatggccgacaagtatggacctatcttcattgtccgatttgggatgtaccctaccctagttgtgagcagttgggagatggcaaaggagtgcttcaccaccaacgacagggtcctcgctagtcgtccagctagtgcttctggcaagtacctcacctacaattatgccatgttcggcttcactaatggcccttattggcgtgagatccgtaagatctctatgctcgaactgctatcccatcgtcgcgtagagttgctcaagcacgtaccttccactgagattgacagctctatcaaacagttgtaccatctttgggtggaaaaccaaaaccaaaataagcaaggggatcatcaggtaaaggttgacatgagccaactactcagagatctgaccttgaatatagtattgaagttggtggtaggaaagcgtcttttcaacaacaacgacatggatcatgaacaggatgaagcagctcgtaagctccagaagacaatggttgaactcattaaagtggcaggggcttcagttgcatcggatgcccttccattccttggttggttggatgtagatggactaaagagaaccatgaagaggatagccaaggaaatagatgtaatcgctgaaagatggcttcaagagcatcgacaaaaaaaactaacatcaaacgacaagggtggcagcaacaacattcaaggtggcggtggcgataacgacttcatggacgtgatgctatccatccttgacgatgattccaatttcttcatcaattacaaccgcgatactgtcattaaagccacctctctgacaatgatattagcaggttcggacaccacaactctgtccttgacatgggctctaacgctattagccaccaaccccggtgccttgagaaaggctcaagatgaacttgatactaaggtgggcagggatagacaagtagatgagcgagacatcaagaacctggtctacctccaagccattgtcaaggaaacactacggatgtacccagctgctccactagcaataccccacgaggctacccaagattgtattgttggcgggtatcacgtaacagcaggcacacgtgtgtgggtgaatctgtggaagttgcaacgggatccacacgcgtggccaaacccatcggagttcaggccagagaggtttctagccgttgagaacgattgcaagcaacagggtacttgtgatggtgaagcagcaaacatggatttcagaggtcaacactttgagtacatgccttttgggtcaggaagacggatgtgtccaggaatcaactttgcgatccagatcattcacatgacactggcacggctacttcattcattcgagttgcgggtgccagaagaagaagtaatcgacatggctgaagattcaggtctaaccatatccaaagtaacaccacttgaactcctacttaccccacgcctccctcttccactttatatatga

SEQ ID NO: 110 - DNA, 1584 bp, Stylophorum diphyllum
atggctgcccttcttcccttagctttcctctacaatatctttttggcttcatcttcgaaagctactagcaagagaacaataagtactaagaaaccgcccatggtagccggtgcatggccaattcttggtcatctccatctgtttaaagagggtgagttgcctcaccaaatgcttaaatccatggctgacaagtatggtccagccttcctcatgaagttcggtcaacaccaatccctagttgtgagtgactaccgcatcgtaaaagaatgctttactactaatgataccctcttctgcaaccgtccatccactacagctttcgatgtcatgacttacgctaatgaatcggtagctttcacagaatacagtccttactggcgcgagcttagaaagatatccactctcaagcttctctctaacaaccgtctccaggccatcaagaacctccgagaagaggaggtggatgtgagcttcaaggggttgtatgattcatggaagaataagaacaacaagagtactgctggcagtgttggtgatgaacgagctccggttttggtcgacatgaagaaatggtttgaagaagtgtcaaacaacgtggtgattagggtaatcgtgggcaaatgtaattttgggactaagatcgtgcaaggtgagaaggagggtgtggagtacaagacaatcatggatgagcttttacgacttgctagtttgtctttgttatccgatttcgcccctatacttggtttgttggatttcttccaaggccatgtccgtaccatgaaacgaaatggcaagaaactagacgtgttacttcagaggtggttggaggagcataagaggaagaagagcacaccagaggatgagcaagacttcatggatgttatgctgtcgattattgaggagagcaagctgtctggctatgacgctgataccgtcattaaagctacttgtctggccatgatcatgggtggaacagacacatccgcagtgagtctaacatggatcgtctctttactgatgaacaatcgtcaagcactaaaaaaggctcgagaagaattggacgcgcaggtggggaaggatagacaagttgaagattcagatttaaagaacttggtttacttgaatgccatcgttaaggaaacaatgcgattatacccactaggtactcttcttgaacgcgaaactaaggaggactgtgaagttggtgggtttcacctcgaaggtggtactcgtttactagtgaacgtatggatggtacagcgagacccagacgtgtggactgatccgacaaagttcataccagagaggtttcttacggagaaggcagacatagatgttgggggtgggaattttgaacttataccattcggagccggtagaagggtgtgccccggagtgtcctttgcacttcaattcctaaatttggtactagctcgtctcattcatggatatgaattgggaactccagaagatgcggatgtggatctaactgagagcccagaaggacatgtcaaccacaaagcatcccctctcgagcttctcctcaccccacgcctcagtaaccctaagctctatgattattag

SEQ ID NO: 111 - DNA, 1644 bp, Stylophorum diphyllum
atggattctgatcatcaacttctcagttaccagttctctgcaagtaatatgtttatcagcctctttgcttttgttctctactatctactagtatggaggccaacaaaatctaatcttaagatgaaaaccatatcatctgaagacaagcaagcacccgaactcgccggttcatggccagttatcggtcatcttcatctccttcatggacctaacccactccatgtagctttgggagccatggcggacaagtacggaccagctttcaccgttcgagttggtgtccatcggacacttgttgtgagtagttgggaggtagcgaaagaatgtttcactaccaatgacaaggtctttgtatctcgtccacgtcaagcagcaggaaaacacatgggttacaacaacgccatgttgcgattcgcctccgatacaccatactggacccaaatccgtaaaatgttgaaacgagacctcctctctaacaaccggattgagttgctaaaccatgcatggcattccgagattaacacatccattaaagaactgtacgagatgaattggtcatcaggcgaaggacgtcgtggcggcattagaccgccggtctcggtggacatgaagcaatggcttggtgatttaaccctaaacatgtctgttaaaatgattgctgggaagagatgttttggcagtggtgtttctgcttgtgatgaaggagaagctagaaggtgtcaaaaggggttgaaagacttcgttaggttgatgggtcagattgtggtgtcggatgcaataccatttcttggatggttggatttggatggctacgagggggaaatgaagcgagccggaaaagagctcgaccgtttactaggaggatggttggaagagcataaaatgaagagatcaccaggtgatgaagcttcagcccagaaggactggatggacttgatgctgtccgtacttggggatggaaagcttgacggctattacgacgctgatacgatcaacaaagctacttgtctggctctattgcagggtggtagcatctggacgatgcttactttattatgggcatttgccttactagtgaatcatccacatgtgatgaaaaaggcccatgatgagctggacaaccatgtaggcagagaaagacaagttgaggaatcagacatcaagaacctcacttaccttcaagccatagtcaaggaagcaatgcgtctttactcggtgtcgatgcgactactcgaatccaccgcagactgcactgtttctggctacgatgtcccagctgggactcgtctaatcgtaaatacttggaagattcagcgtgaccctcgggtatggtccgacccatctgaattccatccagagagattcctcacacaccgccatagggacatggacttgtatggtcagaattttgaaatcacaccttttgggtcgggcagaagatcatgcccaggttcctcattgggtcttcaaatggtgcaactgacaatagctcgtttgctacatgggtttgagtttaaaacaccttcggacgcccccattgatatgactgagagtgttggggtagaaaatatggttaaagcaacaccaattgaagttctgctcaccccgcgcctcctcgatgaggtttatgctttctataattag

SEQ ID NO: 112 - DNA, 1687 bp, Stylophorum diphyllum
cttttgccagttccaaggtattgtaggaatcttattagctttcctaaccttcttatattatctatggcgggcttcaattacaggattaaggactaaacccaaacacaacgactttaaagtcactaaggcagcacctgaagctgatggtgcatggcccatagttggtcattttgctcagttcataggccctcggccacttttcaggattcttggagatatggccgacaagtacggttcgatcttcatggtccgatttgggatgtacccaaccttggttgtgagcagttgggagatggcaaaggagtgcttcactaccaacgacaggttccttgctagtcgtccagctagcgctgctggcaagtaccttacctacgactttgctatgttaagtttctccttttatggcccttattggcgtgagatccgtaagatctctatgctcgaactgctatcccatcgtcgcgtagagttgctcaagcacgtaccttccactgagattgacagctctatcaaacagttgtaccatctttgggtggaaaaccaaaaccaaaataagcaaggggatcatcaggtaaaggttgacatgagccaactactcagagatctgaccttgaatatagtattgaagttggtggtaggaaagcgtcttttcaacaacaacgacatggatcatgaacaggatgaagcagctcgtaagctccagaagacaatggttgaactcattaaagtggcaggggcttcagttgcatcggatgcccttccattccttggttggttggatgtagatggactaaagagaaccatgaagaggatagccaaggaaatagatgtaatcgctgaaagatggcttcaagagcatcgacaaaaaaaactaacatcaaacgacaagggtggcagcaacaacattcaaggtggcggtggcgataacgacttcatggacgtgatgctatccatccttgacgatgattccaatttcttcatcaattacaaccgcgatactgtcattaaagccacctctctgacaatgatattagcaggttcggacaccacaactctgtccttgacatgggctctaacgctattagccacctawcccctgtgtgccttgagaaaggctcaagatgaacttgatactaaggtgggcagggatagacaagtagatgagcgagacatcaagaacctggtctacctccaagccattgtcaaggaaacactacggatgtacccagctgctccactagcaataccccacgaggctacccaagattgtattgttggcgggtatcacgtaacagcaggcacacgtgtgtgggtgaatctgtggaagttgcaacgggatccacacgcgtggccaaacccatcggagttcaggccagagaggtttctagccgttgagaacgattgcaagcaacagggtacttgtgatggtgaagcagcaaacatggatttcagaggtcaacactttgagtacatgccttttgggtcaggaagacggatgtgtccaggaatcaactttgcgatccagatcattcacatgacactggcacggctacttcattcattcgagttgcgggtgccagaagaagaagtaatcgacatggctgaagattcaggtctaaccatatccaaagtaacaccacttgaactcctacttaccccacgcctccctcttccactttatatatga

SEQ ID NO: 113 - DNA, 1569 bp, Tinospora cordifolia
atggatttaccacaaccgaccatatcaaccacacttctagcttttttcagcatcttattattcatcatatgctatcgtctcttgagcactaaatctgacaagagatcatcatcttccagaaacaaacctcttgacgctcctggagcatggcccgtcatcggtcacctacaccttctaaacggcgtcatacaacacgaaattctgggaaccatggcggacaaatacggaccggcgttcaccatctggctcggcacgcgtccggcactagtggtaagcaactgggaagtggctaaggagtgcttcaccacctgcgataaggccttagcaagccgtcccccaagcttagctttgaagatcatgggctacaacgacgcgttattcgcgttcgctccttacgggcaatactggcgtgagttgcgcaaaatagtgatgattgagcttctttctagtcggcagcttgattcgctgaagcatgtttgggattctgaaattgattcatgcatcgaagatttgtatgaaaaatgtaagggtcatcgtgaaacagtactggtgaatatgaagcagtggtttgcggatttgatgatgaacgtagtggtgagaatggtggttgggaagctgaattttgggaaaacgaaagaaggtgatgatgaggtcgcgaaggcgcaccaagggcagttgaaggcgatgagagagttcttcaagtgggtggatgtgtttatgatagaagacgcgtttccgattctgacttggttggatcctcaagggtatcaaagaaaaatgaagaatatagcgaaagatctggactcgctggttcaggggtggttagatgagcataagttgaagcaaaaaactggcgataatgggaagaaagacttcatggatatcatgctgtcggcggtcaaagatgctagtatatctgacagagacgatgagacaatctgcaaggcgacgtgcttgaatataattcttggggcgagtgataccacaacggtgaccctcacatggaccctttctttgttactaaataatcgacatgtcttgaggaaggcccaagaagaattacaagcacaagttggcaaacacagatgcgtggaagaatcagacgtcaagaaccttgtttatctacatgccatcatcaaagaagtgctaagactttacccagctgttccgcttttaggcccacgagagagtgtagccgatactgtggtggcaggctaccatatacccgcaggcacacggctaatcgtgaacctttggaagattcatcgagacccgcttaactggcctgacccgcttgagtttcgacccgagagattccttacgacccacaaagacacagatgtgtggggtcagaattttgagttgactccttttggatccggaagaaggatatgcccaggtatttcgtttgcgcttcaagtaattcctctcacactggctcgattgctccatgggtttgagctcaccacaccaggtagtgcaccggtggacatgactgaaagcactgggctcaccaacttgaaagccacacctttagatgttttcatcagtccacggcttgttctttga

SEQ ID NO: 114 - DNA, 1581 bp, Tinospora cordifolia
atggagtccattcccacagcaattaatgtgcttcttgccttcgtctccatctactatcttctgaagttccggaaaaagatcatcacaacgactagagatatcaagaagatcaaagcaccagaactaaagggtgcatggccgatcataggtcaccttcatctattcagatccgatgatcttctgcatcgaaagctcggtgccatggccgacgagttggggccagcgtttatgatccggctaggtatgcgccctgctcttgtagtgagtaactggcaaacagccaaggagtgctttactaccaaagacaggatcttcgcaacccgtcccgattcggttgctgcgaagcacatgggctacgaaaatttaatattgggcttcactcgttacggaccttactggcgtgaggttcgcaagattgtcacgctcgagcttctctccagccatcggctacacctgctcaggcatgtcaggatatcagagattgacatgtccattaagaaactccatcagctttgtaccagtaacgacaacaaatattcatcagttgtggtcgacctgaatcaatggtttaaagctttaactcttaatataatcgtgagaataatagcgggcaagcggtattacggtggagacctcgaggacgatgaggagtcgcggcggtggaagaaagctcttaacgaatttatgcatctctttggaatattttcggtgtcggatgcgattcctcagttgcagggtatggacgtgcagggacatgagcgtgtcatgaagaggactggtaaggatattgatgtgattctgagcaaatggttggaagagcacagaaggaagaagatcagggttaacagggaaggagctgagaaagatttcatagatataatgcttgacctaatcaaagaaaacgtcaatatctccggtcatgatgctgataacgtcgttaaagccacttgtttggcccttgtatcagcaggaagtgatactacaatgatcactctaacatgggctgtgtcgttacttctgaataatcatcgagtcttggagaaagctcaagccgagttggataatcaaattggaataaacagagtacatgtagaagaagaggacatcaagaatctaccataccttcaagcaattgtgaaggagactcttcgcttatatcctgctgctccattttcattgccacatgaggccatggaggaatgtactgttgcaggcttccatgttccgaaagggacacgcttaatcacaaatatctggaagctgcaacgagatccccaagtctgggaggatcctttggagttcaggccagagagattcctcacaagtgatcgtcgtcatgtggattttagagggcaacattttgaattaataccatttggatcaggaagaaggatgtgccctggcatttcatttgccattggtgtcttgcacctgacgcttgcgcgtttacttcatgaattccaccttggaactccgaccaacgcacccatagacatgaatgaaaatccaggaattaccctcgagaaagcagatcctcttcatccactcgtctctccaagacttacttccatcaactactga

SEQ ID NO: 115 - DNA, 1617 bp, Tinospora cordifolia
atggattcccagttaacttcgtttcaatccaagcccagtgcatatctaattgctgcacttcttgccttagtttctgcatactatctcatcatcaagaagaaaagcagagcaacttaccaagataactacggcaagattagggcaccggaaccaaagggtgcgtggccaatcatcggtcaccttctcctgttcaaacccaacgatgtgctgtatcaaaagcttagctcgctcgcagacgagttaggaccagcgttcatgatacggctgggcatgcgctcagctctcgtaataagtaactgggaaatagccaaagaatgcttcaccaccaacgacaggatcttcgcgacccgtccaaagttgatggcctcaaagcacatgggctacggtggcgcagaagtcggcgtcgcgccctacggtccctactggcgtgaggttcgcaaaatcatcacggtagagcttgtctccaaccaccggctcaacttgctcaaggacgtcaggatatcggagatcgatatgtccttaaaagagctctatgatctttgtatgaagaagaagaagaacggcagtggagaagaatcatcgcgggttgaattggacctgtaccaatggttcaaggacatgtcgctcaacatattggtcaagctcatcgcgggcaagcggtattacggggtggccgctgccgccaacgaagatgaggaatcgcggcggtggaagaaagcaacggaggaatcggttttcctgtttggacaatttgtggtgggggatgcgattcctttgttggagggtgtggatgtgcaagggcttgagcgtgccatgaagaagactggtaaggaaattgatgcagttttgagtaaatgggtggaagagcatagaatgaagaagcagcagcttaatggggcaagagatgagcaagatttcatagatgtgatgcttaacataataaaggatggcaagatctctgatcatgatgctgatactatcgttaaagccacttgtatgtctcttgtacaagccggaagtgacaccacaatgcttaccctgacttgggctgtgtgcttgctactaaacaattgcaatgttttagagaaagctcaagcagagttggatgatcaaattggaagaagcaaaggacgtattgtagaggaagatgacatcaagaaactgccttatctccaagcaattgtgaaggagacttggcgcttgtaccctcctgctccacttgctgtaccacgtgaagccatggaggactgtactgtagctggcttccatgttccaaagggtacacgcttaatgacaaacatatggaaactgcatcgagatcccaaagtgtgggacgattctttaaagtttaggccagaaagattcctctccagtgaacatgcacatgtggattttagagggcaacagcatgagtttatgccctttggatccgggagaaggatgtgccttggaatgccattagctattggtgtggtacaccttacacttgcccgtttacttcatgaattcgagcttgcaactccgtcaaatgcaccagtagatatgagtgaaaaagctggtcttactttggttaaagcgacgcctctaaatgttcttatcgccccacgcctttgctaa

SEQ ID NO: 116 - DNA, 1596 bp, Tinospora cordifolia
atggattcaataatactccagagtaaccttcttaccactgttataataataacatcctttggcctctttgtcctttccttttactatgttctctggaaggcaattagaactggcaacaagagaaattgcagcaaccctaaggctcctgaagctgctggaggatggcccattctcggtcatcttcatttattcagaggccaaggcctattactgcacaaaatttttggagccatggccgaaaaacacggaccagcattcaccattcggctcggaatgcgtccggcactagttgtgagcaactgggaagtggctaaggagtgtttcaccgcaaatgatcgggcccttgcgagccgccctacgagcttagccttgaagattatgggctacaacaacagcttgttcgcgttcgctccatacgggcaatattggcgtgagttgcgcaagatagtgatgcatcagcttctctctagccgtaggctcgagttactcaagaacgtttggctttctgaaattgatatatggatcaaaggcttgtacgagaattccttggttaataaagtggtggatatgaagcagtggtttggggaattgatgatgaacatagtggtgagattggtagcaggaaagcgaagttttgggaaaatcagagaaggcgatagtgaggaagcgaaggcgcatcagcggcaaattaaggcactgcgagatttcttcaggttggtggaggtttttatgatagaagatgcgtttccttttctaacttggttggatcctcgagggtatcaaaaagaaatgaagaatatagcaaaagaactggattatcttcttgaggagtggttagaagagcataaactgaagcaacaagctgcatgtgatgatcagagcaaggacttcatggatgttatgctgtcggaggtcaaggattctactatcactgaaagagatgcaaacacaatctgcaaagcgacttgcctgaatgtaattttaggtgcgagtgataccacaactctgactctcacatgggccctttccctactactgaacaacagacacgtattgaagaaggcccaggaagaattaaatgcccaagttggcaaggataaacaagtggaagaatcagacatgaagaaccttgtgtacctacatgccataatcaaagaagttctaagactctacccagctgctcctttgtcagtggcacatgagtctttagaagacaccgtggtggctggttaccatgtctccaagggcacacaggtcatattcaacctttggaaaattcaacgtgatccatctgtatggtccaacccgctagaattccaacctgagagatttctcaccacccacaaacatgtagacatttggggtcagaattttgaattgataccgttcgggtcgggaagacggatgtgcccaggcgttcctttcgctcttcaagtggtttccttaacgttggctcgattacttcatgggttcgagctcacaacaccaggtggcgcagctgttgacatgaccgagactcctgggctcactaatatgaaagcaaccccggtagaggttttccttagacctgacctccctcaccagctctatgcttga

SEQ ID NO: 117 - DNA, 1575 bp, Thalictrum flavum
atgccaagccaaaccatacaaattataatggatttctttcatcaatgtgttgcaactatattattttgtgtcttagcttcaccttttttcttttattatctactcccatggtggaaaaatgctaatgatcatgatcttgccaagagcagaggaaagcctgttcctgaagtagatggtgcatggcctattatcggtcatatgcatatgctgcaaccatcagatagcttttactcatctttggcggaaaagtatggaccaattttcacacttcgaattggtttatgcaaaacaattgtgattaatagttgggagctagctaaggaatgttgtaccactcatgatagagtgtttgcaagctcgcctgaagctacagcggcaaagatattgggatatgattatgctatgtttggacgaaacccttatgggccttactggcgtgaaatgcgcaaaataattataactgaacttgtgtcaaatcggagactggagctactaaaacatattagagtaacggagatcagtacatccatacaagaattgtaccagttgtgggaagcaaggagtagtaagaatgtaaaagaaagagttgtggtggatatgcaaaaatggtttggtgacttgatgctaaatattggtgtcgagatggttgctggaaagagatattttggtgcaagttcgaatgaagataaagaggaagcaagacagttgcataagacatttaaagatttctcgaacctatttggagtgcctgtgctatctgatgcaattccatttcttaggtggttagactataaaggacatattaaagccatgaagagatgtgcaaaacaagtagattgtatcttgcatagatggttggaggaacataaacaaaacaagacaacaattgctggggatttcatggatattttgttgtcagtacttcaggataaagagatctttggtagggatgcagacaccgtaatcaaggctacatgtctgaatatgatgctgggtgttgtagaaaccaataaggtcactgtaacaatggcactcatctcattgttgaacaatcgtcgcattttgaagaaggcacaagaagaaatagacattcatgttgggagcgataaacaagttgaagaatcagatatagagaaacttgtatatctccaagccattgtcaaggaaacgttgcgcttgtactcacctggtctaggaacacgtgagccctcagaggactgcaccatatcaggtttccatgttccaaaaggcacagaggtaatggtaaatgttcagcagattcatcgagatccaagcatttggtctaaccctcttgaatttcaaccagagagattcctcaccacacaagcaaatatagactttgggggtcaacatcatgaatacattcctttcggggcaggccgtagattatgccctgcaatctcattcgcagttctggtggtgcacttgacactagcacgtttgctgcaagggtttgattttgcaacaccaaaggatgcacctgtggaaatgaatgagagtgtggaaactctggaagttttaatcaccccacgactccctttgcatatgtattaa

SEQ ID NO: 118 - DNA, 1605 bp, Xanthoriza simplicissima
atgcacaatcccataccaaaccaatggctaccaagttcaactcttctgacgcctatcattgttagtttcctcgttatcgttctcttctatatctataagaagagaagtagtaacacgatcaggaccaagaaggcgcctgaagtagtaggagcatggcctgtaattggacatctaaatttatttagttgtcctaaaccgggtcatatagtgctgggcgaactagctgatcaatatggccccgcatttactatccattttggtatgcatccaacactggtggttagtagttcggagctggtgagggactgtttcactacgaatgacaaattattttccagccgtctagttaacaaagccatcaagtacatgttctacgatcaggacactatttcattcgcaccttatgggccttattggcgtgagcttcgtaagatgattgctcttaatcttttaaataatgaacgcatcaaaatgctccagcagcaaaggatttcagagatggatgcttgtttaaaaaagctgtacgatttatcagcaaaaagaaaagacgagaacgcaggggtattggtggatatgagtaaatggtttgccgaaatttcctttaatgtggttaccagaattgttgctggaaaacatatttttgggcctaaagttgaaagatacaagaatgtgatggaagaggcacgccgtcttatggacgtcatggttttctccgacatggtaccttatttaggatggttggatagattgcgaggagtggacagtgctataaagcggacagccaaagaattggactctgttcttgagagctgggtggaggaacatcgtcgaaagagcgtgtcaatctcagctggaacgggaggcattttcaacataaaagaagaggaggaattggattttatagacattatgttgtcgattatagccaagaacaatttaccaggtgacgatcctgatactttaatcaaggctattgtccaggaaacgtaccttgctgcgtgggacaacacaacggtaactcttacatgggtcttgtgtttgttattaaacaataagcaagttctgaaaagagctcaaaatgaattagacgctcaagttgggaaggagaggcaagtagaagattcagacattaataatcttccctatgtacaagccattgttaaagaatcattgagattatatccaccaggaccgataattgaacgggcgactactgaggattgtaacgttggtggcttccgcgtcccggcaggtacacggctttgggtaaacttatggaagttacaacgagacccaaaagtatggcctaatgatccgctagaatttcgaccagaaagatttctcaatgacaatgcagacattgatttgaggggtcagaattctgaattaataccatttggatcagggaggcgcatgtgtcccggtgtctcattttctcttcaagtcatacatctggtgattgctcgaataattcagggatttgagttaaaggccccaacagatgcagatatcgacatgtctacaacgctaggaatgataagctggaaagcaacaccacttgaagtactcatgaatccacgcttcccacccgtgttttacaagtga

SEQ ID NO: 119 - DNA, 1653 bp, Xanthoriza simplicissima
atgtctacattacaaattagcattttaacagttaaatccccgtattcacaaatgcattattatccccttcttcaccaatggctaccagcttcaatggcgctagtcagtttgctcgttatcattctcttctctatcttcaagaagagaagtagtaagatgatcaaggccaagaaggcgcctgaagtagcaggtgcatggcctctaatcggacatctcaatctatttagtggtcctaagctacttcatttagtacttggagaactcaccgatcaatatggaccggcctttatgatccatcttggtatgtatccaactttggtggtgagtaattgggagcttctaaaggactgtttcactacaaatgacatattcttctcaaatcgtccagttaacaaagcgatcaagcacatgttctacaataaagagtctattggattcacaccttatggatcctattggcgtgagcttcgtaagatgactactctcaaacttctatcaaaccaccgccttgatctgctcaagcccttgagaatttcagagatggacgcttgttttagaaacctttatgagttgtggacgaaagataaagacgggaatgcatggctgttggtggatatgagtaaatggtttggcgagatctcgtttaatgtggttgcaagaattgtagctggaaaaaagaattttgggtccaaaggtgataggtataagacagttatggaagaggtggtccgtcttatgggtctcagagctttgtcggacgcggtaccatatttaggatggttggatcagttgcgaggactggacagtgctatgaagcgggcggccaaggaattggattctgtgcttgagagctgggtggaggaacaccgcctaaagagggtgtcagtttcagctggaactggaagcactgtaaagacagcaaaagaggaggaggaggaggaggacttcatagacattacattgtcgattttggcggagaaccaattaccaggtgatgatcctgataccggcatcaagtctcttatcctggacatgatcctgggtgggagcgacacttcaacggtgacactaatatgggcaatgtgtctgctattaaacaatgtgcatgtgttgaaaagggctcaatatgaattggacgcacagattgggaaggaaagacaagtagaggattcagacataaagaatctgccctacatccaagccattattaaagaaacaatgagattatacccagcaggaccgattatcgaacgccaggctaatgaggactgcgacgtgggtggcttccatgtcccagcaggtacacggctatgggtaaacttatggaagttacaacgagacccaaatgtatggaaggacgacgcattagagtttcgacctgaaagatttctcactgatcatgcagacattgatttgaagggtcagcatctggaattaattccatttggatcaggtaggcgtatatgtcctggtatctcatttgctcttcaagtcatgcatttggcacttgctcgaattattcatggatttgagttgaagaccccaaatgattcaaatatcgacatgtctggaactcctggacttttatgctgcaaagcaacaccactccaagtactcctgactccacgttttaaccccatgttttataagtga

SEQ ID NO: 120 - DNA, 1563 bp, Xanthoriza simplicissima
atggattcacttcgacattgtttaggaggtattcttgccttactaatctttcttggttatctgcaatggaagagaggaacaagtaacaagtgcatagaagctcctcaaccggatggggcatggcctatcataggccatttgcctaggttgatgaaaccccaaataatgcatagaacgttgagcaccatggctgataaacacggcccagcgtttactctccggcttggcgtacataaaacattggtggtgagtagttgggaggtagccaaggagtgtttcactaccaacgacagagtcttcgctacccgcccaacctctatcgccgtggagatattgggctacaactacgccttatttgcctttggtccttatggctcatattggcgtgaagcccgcaagatagcaatacttgagcttctctcaaaccataggctcgagttgctgaaacatgttcggatctctgaggtgagcacatctataagagaattgtaccaagtgtggaaagaaaattgtgatatagcaaatggatctgctttggtggatatgaaaccatggtttggtgacttgacactaaacgtggttgttagaatggttgctggaaaacggtacatgggtggcagtgttaaatcggatgatgttgagggaaggcgatttcagaaggccactaaagatctctttgatttatttggactgtttatattgtcagacgcgcttccatttatgggttggttagacctccatggccataagaaagccatgaaaaaaactgccaaggagctggactccattatgcagagatggttggaagaacatcgacaaagtttattggatgatggaacaaaggaggagaagaaggacttcatgtatgtaatgttatctatccttgaggataaaaagctatttcaatatgatgccgacatcgttaacaaagctatttgcatgaatatgattatggcaggtactgatactcaaatgatcactctaacatgggtcctttctttactactcaacaatcgacacattttaaagaaggcccaagatgaaatcgactccagtgttggaaaagatagacaagtcgaggagtcagacatagtgaaactagtgtacctccaagcaattgtgaaggaagcattgcgtctctacccacccgctcctctatccgcacaacatgaggccatggaggactgcactgtggctggctactatgtcccagctggcacacgcctaataacgaacatacggaagattcaacgagatccacgcgtatggtctgacccttttgagttccatccagagagatttctcacaaaccaagcaaatgtggactttagaggtcaatcttttgagttcattccttttggatctggaagacgaatgtgcccaggcatttcatttgcgcttcaagtggtgcatttgacattagcacgtatcctacaaggttttgattttgaaacaccaatgaatgcttctgtggacatgactgaggcaccaggtctgacaaatgttaaatcaacccctcttcaagttctaatcaccccccgtctccacccaaacctatattaa

SEQ ID NO: 121 - DNA, 1572 bp, Xanthoriza simplicissima
atggatttacttaacccatattttgcaactatctttggtggtttctttgcgttactaatttttctttttatcatttcacagaagagaagtaggattcccaagatcagagcagctccagaaccagttggggcatggcctatcgtaggacacttgcctatgttacttggacccagattaccccattttgtgttgggagaccttggagagaagtacggatcagcatttactctccggcttggcatacataaaacattagtggtgagtagttgggaggttgccaaggagtgttttactacaaatgaccaagtattcgccacccgccctagcttcatggcagcgaagataatgggctataattatgctctatttggcttagcaccttacgggtcatattggcgtgaactccgtaaaatatctattattgagcttctttcaagtcataggcttgaattgctgaagcatgttcgagtctctgaggttagtacatcaatgaaagaattgtacgaggtgtgggcagaaaactgtagtaatggaaacggatctgttttggtggagatgcagcgatggtttggtgacttgacactaaatataagtgttaggatggttgctggtaagcgatactttggtactagtgctagtttggatgacgacgaggcaaggcgaatatcaaaggccacaaaagatttcttccgtttgacagggatgtttgtggtgtcggactcggttcctttcctttggtggctagattttcagggccacgagaaagccatgaagagaaccgccaaggaaatggacgatatatttgggggatggttggaggatcatcgacgaaataaacttgctggtggaacaaaggtgcagcaagacttcatggatgtgatgttgtctatccttgaggacgaaaagttctttggttataatgccgatgttgtcacaaaggctacttgcctgaatatgttgttgggtgggacggataccacaatggtcaccttgacatgggccctctcattactactgaacaaccgtcatattttgaagaaggcccaaactgaaattaacactcatgttggaaaagatacacaagttgatgaatcagatatagtgaaacttgtgtacctccaagcaattgtcaaggaaacattgcgtctctacccagctgctccactatccacaccacacgaggccactaaggactgcaccatcgctggctaccacgtcactgcagggacgcgcttgataacaaatatatggaagattcaacgagacccacgcgtatggtccaaccctagtgagtttcaaccagaaaggtttctcactgatcaagcaaatgtggacgttaggggccaacattttgaattcattccttttgggtccggtagacgatcctgcccaggaatctcgcttgggctacttgtggtgcagttggcattagcacgtttgctacaaggctttgatttcgaaacaccatcggatgcattggtggacatgactgagagcgctggattaactaatctcaaagcaacacctcttcatgtcctaattacaccgcgtctccattcaagcctgtattaa

SEQ ID NO: 122 - DNA, 1593 bp, Xanthoriza simplicissima
atggactcagttcaccaaggccaatacctaccaactccgatggtcagtgtctttgtgttttttatcagtctttactttctaattgtgtggaagacaaggtctagttccaagactaacacttgcaacgaagtacccgaagcgcctggggcgtggcctattatcgggcacctccatttgttaggtgggagtgaattaccccacaagacattaggagccatggctgataagtacggcccaatctttaagattcgtattggtgtgcatcaagcattggtggtgagtagttcggatattgtaaaggagtgtttcactactaatgataaggtttttgcttctcgtcctacctcgacagcatcaaagatcctgggctatgattatgtcatgtttggtttctctccttacggaccgtattggattgaactacgcaaaataattatgtcggaacttctctcaaaccgcaggctggaactactaaaacatgttagggactctgaaatcgatatatctatccaagaactatacaaggtgtggaagaatcatgataagtcaaaaggtccaatcttagtagacatgaagcaatggtttggagacttggcactcaatgtgattctaaggatgattgccggaaagagatactctggttcaatcttttcttctgatgagacagaagcaaggagatgtcaaaagggagcgagagatttctttaggctgttggggctattcatcattgaagatgcacttccgtatctaagttggttcgacttacaaggttacaagaaagagatgaagaacacggcaaaagaacttgattctgtttttcagagatggctggaagagcataaacgaacgagagaaaccggtgaactgaatcgggagcaggacttcatggatatcttaatgtccacactggaagagacaaagatatctgaatacgacaatgacactatcatcaagtctacttgcctgagcattgtaacaggtggaaatgacactacaatggttactctcacttggatcctatccttacttctaaacaataaacatgcactgaagaaggttcaagatgagctggacagccacgttggaaagcatagacacgtggaagagtcagatatcaagaacctcatctacctccaagctataatgaaggaagccttgcggttgtaccctgcaggtccactatcaggtcctcgggtggcagacgctgactgcaccttagcaggctaccacatcccagcaggcacccgcttacttgtgaatacctacaagattcaaagagatccattggtgtggtctgagccatctgagttccgaccagagagattcctcactagccatgtaaacatggatgttaagggtctgcaatatgaattaataccttttgggacaggtaggcgtgcgtgtccagggatgttatttgcgcttcaagtggtgccactagtcctggctcggtttctacatgagttcgagccaaagactgaaatggatatgccagtggatatgacggagactgcgggactaagtaacgccaaagcaacgccactagaagtagtaatcaccccacgccttcagcccgagctttatagtttataa

SEQ ID NO: 123 - DNA, 1587 bp, Xanthoriza simplicissima
atggacttcaccatgatcatccaatggcttctcacatcctttgctattcttgttgcatttgttctaatctggtctagtgcaacaagatctagtactaggaaaagaaacaaaacagcacctgtagctgctggtgctttgcccattgtaggacacctacatatgctaatgggacgagaactgcctcatcgattgctttcaaatatggctgacaagtatggtcctgccttcatgatgaagtatggcttacaacctgcacttgtggtgagcagtttgaagctcactaaagagtgttttgttcacaacgatagagctgtttttaaacgtccaagaagcaaagcattgaaaaacttgacctatgatcaagcttctttgggttttgcgccatatggaccactttgggtggagatgcgaaaagtatctaaaactaatctcctctctaaccaaaggcttcaaatgcaaagacatgtaagagcctcagaagtcgacgctttcatcaaagagctttacgatctatggtcttccaaatccaacaacatcaaaggcgcgccacttttggttgaaatgaataaatggtttgaagaactggcacttaacgtagtgaccaggatgctgagtggaaaaagacacattggctttaaggcaaggcgtggtgaagatagtgaatctatgcattataagaaagttgtagttgatgctactcttttaactgcaaagcttgttgtgtcagatttctttccttctcttggattggtggactacttgcaaggtgacgagagctctataaaggggacaagcaaagaactagacgcgatcctcgccacttgggtggaagagcatcgccataagaaggtttcaggctcagaggatgatgagaaagacttcattgatctcactttgtccatgatagatcaaactcagcaccaaggtgcagatgtcgacaccttcatcaagtctatgtgtgtgggcatgatctttggtgggagtgatagcacatcagtggccttagcatgggctctttccatactgatgaataatcgtcctgttttgaagaaagcccgagaagaaatcgatcgacaagtaggtagagataggaaagtgaacgatttggatgtcctcaaattggattatctcaaggcaatcgtaaaggaatcgatgcgattatgcctagtcggaccgcttcttgaacgcgtcgccgtagaagattgtgagataggcgggtatcatgttaaagcaggctcgcgcgtagtagtgaatatttggaaaatgcaacatgatccaaacttatggtctgatcctttggaattccaaccagagagatttctcactacaaacgcaaatgttgaacttagaggccagcatttcgaactccttccatttggagctggtagtcgtatttgtcctggaattacatttgccctcgaacttattcagttaacacttgctcgtctaattcatggatttgaactgggaactccgatggatgcagacgtcgacatgacagaaacatcaagtgttaccaactatagggcaacacctcttgaaatattactaacaccacgcctggatccaaagctttacaattattag

SEQ ID NO: 124 - protein, 532 aa, Argemone mexicana
MDNFLLQFQPISIAAFFVALVFLYWSYGRKSNKTLKPRAPEAAGGRPITGHLHLFYGEELTHRKLGSMADKYGPVFNIRFGSHKTLVVSNWEIVKECFTTNDRLFSNRPGTLAIKLMFYDTDSVGYAPYGNYWRELRKISTLKLLSNHRIETLKHLRTSEVESCFKQLYNQWEMKNENRVEVDKLGFASVRMDNWFGDLTFNVVARIVAGKKNFAGGAVNGDIGAQRYKVAMDESFRLMLTFAYSDVIPSLKWLDKLRGLIRDMKRCGSEIDSIVASWVEEHRLKRNSSENNNLDLEEDFIDVCLDIIESSSLPGDDPDTVIKSTCLDMILGGSDTTTVTLTWAISLILNNPHVLKRAKEELNSVVGKDRRVEDSDIPHLTYIHAIIKETMRLYPAGPLIERRTMEDCEVGGYHVPAGTRLLVNVWKMQRDGDVYKDDPLVFRPERFMTSNADVDLKGQHFELIPFGAGRRICPGVSFAVQLMHLVLARLLHEFEITTIPSEPKVDMSESGGLICHKIKPLEVLIKPRLELN

SEQ ID NO: 125 - protein, 537 aa, Argemone mexicana
MDFSSILLLLNINCFTTSLVTLLVLVMVFLYNNTRFTKPKGNKKMIKPPRLPGARPLLGHLHLFGPGELPHKVLSTMADKYGPAFTIKFGKHTTLVVSDIHTIKECLTTNDILFSNRPSSIAFDLMTYADDSVAFAHYSPYWRELRKISTLKLLSNNRLQSIKQLRLSEVNVCFKELYSLCNNNNKSGAPVLIDMKKWFKEVTTNIVIRVIVGKQNFGSKIVRGEDQEAANYKKIMDELSRLAKLSMFSDYAPLLSLFDYFRGNVSAMKRNGKELNAMLQNWLEEHKRKKNSSISNDDEQDFMDLMLSIIDETKLYGRDADTFIKAISLSMIVGGIDTVVVTLTWILALIMKNPFALKKAQEELDFFVGKERQVEDSDLKNLVYMNAIVKETLRLYPLSCILERDTKEDCEVGGYYVEGGTRLLINAWKLQRDPNVWTDPSEFKPERFLNENADIDVGGQHYELIPFGAGRRVCPGVSFALQFMDLVLARLIHGYELGTLNGEDVDLTEKTEGQINFKATPLDLIVTPRLHPNLYDY

SEQ ID NO: 126 - protein, 522 aa, Berberis thunbergii
MESIEFLVTLLLSLLALFCAYAWKRKNHTKDSKIKEPPQPAGAWPIIGHLHLISRGGLPHINMGAMADKYGPVFMIRLGVNRAVIVSNTEIVKECFTTNDKFLLNRPVGLALNLMCYNNAMFGFCRYGPYWREIHKIVMLELLSNSRLESLKHVWDSEISTSIEELYQLCQTQNKTHEGPVLVEMKDWFADMALNVSLRMIAGKRYFGASAGGNKDEARKCQKTIRDFFRLVGLFIVSDALPFLRWLDLGGHQKEMKRTFEDLDYMLQGWLDEHKLNRKSGVNGDQDFMDVMLSILDDSKFPDYDVDTVNKATCFQLIIGGTDTTTVTLTWALSLMLNHPHVLKKAQDELDIQVGKHRQVEESDIKNLKYLEAVIKETLRMRPVGPLLGPRETIEDCTIGGYRVRAGTRVMVNAWKVHRDPSVWSNPDDFKPERFLKKDIDFRDQNFEFIPFGSGRRACPGISFAVEVLPMALARLLHGFELKTQLGCKVDMTEHAGLVHAKATPLEVLVSPRLSRELYVSS

SEQ ID NO: 127 - protein, 514 aa, Berberis thunbergii
GSLALIAIIILSNIVKKSSKSLSSKGGKSAPVVHGAWPVIGHLHLLMGKELPHHALAKLADKYGPAFTLNIGAYQELVISTRDLAKECFTTKDKFFLNRPSNKAMKILTYGEASVGFAPYSPLWVEMRKVTKSNLLSHQRVLMQNRSRASEIDASFKQLYEQCNGKSGASVEMKNWFEEVMLNVVTRNVSGKRSFGTKARLGDAEAVKYKRVIDETARFMGNLVISDMVPSLWWLDNMLGAESAMKKLAIELDSLLGGWVEEHRGKKLSDDEEGDFISLTWEMIDQIQLHGLAPETFIKSMCVGVLLGGSDTTSVALTWALSLMLNNREVLKKAQEELDFHVGKDRKVDDSDLKNLVYLQAIMKETMRIYQVGPLIEREAVEDCEVGGFQIKKGNRILVNLWKLQRDPEVWSDPSEFRPERFLEDKSKVDLKGQNAELMPFGSGRRMCPGVWFGVHSTSLVLARLIQGFEIETPLDAKVDMTETSSVTNYKGSPLEVIARLPGSNLSFMICSYV

SEQ ID NO: 128 - protein, 545 aa, Chordyalis celanthifolia
MTPSISQPFELLLLLMTMESLLLQWQPTSIAVLLLAITIFLYTFTKSPPKTHKKLAPDATGGRPLMGHLHLFNSNELTHRTLGSMADKYGPAFNIRFGSHKTLVVSTWEIVKECFTTNDRSFSNRPGTLYIKLMFYNEDSVGYAPYGAYWRDLRKLSTLKLLSNHRLESLKHLRVSEMNECFKQLYEICNKGSKSVAVRMDNWFGDLTFNVVARIVAGKRNFASISNDVGAMRYKNAMDEAFRLMTVFSFSDVIPSLGWLDNLRGLVGDMKKAGKEIDSVVSGWIEEHREKRKRRSSGGNNRDGELEEEDFIDITLSILETSSLPGDDPDMTIKSTCLDMILGGSDTTTVTMTWALSLLLNNAHALKRAREELDLHVGRDRQVEDSDINNLVYIQAIIKETMRLYPAGPLIERMTKEDCEVGGFHIPAGTRLLVNLWKMQRDPNVWEDPLEFRPERFLTNNAEIDLKGQHFELIPFGTGRRICPGVSFALQLMHLALARLLHSFEVASPMDAKIDMTETAGLISHKVIPLEVLMTPRLDSKLYDY

SEQ ID NO: 129 - protein, 523 aa, Chordyalis celanthifolia
THTTEKNLPPEVPGALPVIGHLHKLGGRKGLLPYHVLGAMADKYGPAFTFQFGSNRTLVISNWEMVKECFTSTNDKLFAYRPTALFNKEVFCSDHSFGFGPYGPFWREMRKVCSLHLLSNYRLELLKHSRKSEMDECFKELYQLWSASNISKDKQPAVLVVEMKKWFEDAMFNVASRVVVGKGSLKSHEKAGGSDNEVARNKYKKGMDEARRHMGTFVISDRIPFLWWIDYLRGIHSSMKRTAKDLHAIVETWLEEHRLHCHKRRVLQLDANHEVEDMAKEEEKDFMDVLLTMADEGAIKIFDHDLDTVIKANCLDMVIAGTDTPTVMLTWTLSLLLNNPDVLKRVRDELDLHVGKERQVEESDVKNLVYLQAVFKETLRLYPAVPLNERLTMEDCNVGGYDIPAGTRLLINIWKVQRDPNVWQDPSEFRPERFLSKEKSTIDVRGLDFELIPFGTGRRMCPGISFSLQLMHLGLARLIHGFELATPMDLDVDMSANPGAFNYKSTDLQVLVSPRFHSKFYGC

SEQ ID NO: 130 - protein, 536 aa, Chordyalis celanthifolia
MDFLALQWFPASLTALLALAVLYNFWTKQRTYKNGKTSTKQAPVAAGAWPVLGHLHLFGGGELPHKMLATMADKYGPAFTMKFGTHQTLVVSNTKIVKECFTTNDTLFANRPSTTAFHLMTYDNESVAFTPYGPFWRELRKISTLKLLSNHRLQAIKDVRASEVNVCFRELYSQWRINKSEPETSDHQGPILVDMKKWFEEVSDNVVLRVIAGKQNFGSKIVHGDKEALHYKKIMDEILRLAAVSMLSDVAPLLGWLDMFQGHLSAMKRNAKEVDTMLCNWLEEHRTKRLSSDHDGVEQDFIDVMLSIVEENKFSGHDNDTVIKATVLAMIMGGTDTTAVSLTWIVSLLMNNRHVLRRAQDELDLHVGKDRQVDDSDLKNLVYLNAIVKETMRLYPLGALLERETKEDCEVGGFHVKGGTRLLVNVWKLQRDPSFWTDPTEFKPERFLADKANIDVGGQHFELLPFGAGRRVCPGVSFALQFMHLVLARLLHGFDLATPMNADVDLTESTEGHVNQKASPLNLLVTPRLHSKLYEY

SEQ ID NO: 131 - protein, 543 aa, Chordyalis celanthifolia
MEYTFSSASLFSSSSLQQWLSTLLLLISSITISLYLTRRGKSSPPMVPGAWPLIGHLHLLGGNDPLHIVLGTMADKYGHTFAMLFGKHPSLVVSSSDIVKECFTSTNDKLFSHRHVPTGVKYMFYNNDSFGFAPYGPYWREMRKMNSLSLFSHHRVEMLNRIRTSQINIWFKNLYEMCTKEKSTSTSSDGVVVEMKSWFDEMFFNVLVNMIVKPINDDEELVKKYREVATEAGRLLSSMAVSDMVPSLGWLDHLFGIVGKMKKTAKDMDAILTTWLEQHKIKSQQLRRSNGGEGAADQTEEEEKEGKGLIGDLLSMQESALFGHDRDTVIKSACQALIMAGSDSTSATLTWVLSLLLNHRDALRKAREELDQVVGKDRQVDDSDIKDLVYLQAILKETMRLYPAAPILERLAVEDCIVGGFHVQAGTTLFVNVSKLQRDPNLWTDPLEFKPERFLTGCNADVDLKGQDYELVPFGSGRRSCPAVSFAVRVMLLVLARFIHSFEVKTREEDGILDMTESSGHTNCRSSPLEVLISPRLDSKIYC

SEQ ID NO: 132 - protein, 528 aa, Chordyalis celanthifolia
MEYYSSLPFLQQWPLSSISSSPTSIATTLLIVACFTIVFLYINTSSKSNNNLKSPPKLPGAWPFMGHLHLLGGNQPAHVSLANIAEKYKSTPFMIRMGQHSTLVVSSVDLVKECFNNTNDKLFSNRSIARGIRDMFYDMESFGFAPYGYYWRELRKVSALTLFSTHRVDSVIQIKTPQIDGWFKKLYEQCTNTKGGIVEIKSWLDEMMFDVLVKMLVEPKDEGSVEKYRHVAGEALEVLGNMSIYDLVPSLGWLDHFTGLVKKYKVTGKKMDTILNSWLEDHRGEKVAEEHKGLIGKLLSMKEGSKLLGHDGDTAIKSTVQVLILGAGDSAGATLTWAISLLLNHPHIMEKLRKELDAAVGKDRQIEDSDVKKFTYLLAILKETMRLYPVTTLLQRETMEDCAIGGYHVAAGTRLMVNVWQVQRDPNAWSDPLEFKPERFLTECAHVDFSGQYSELIPFGTGRRICPALTLSVRLMLLTLARIIHSFDVKIPNGASSVDMATSVGFVNLRLTPLEVELSPRLDSKIYG

SEQ ID NO: 133 - protein, 537 aa, Chordyalis celanthifolia
MDSSLLQWYTTASMAALLALAFFYKLWSKPRTSKNGKSTLQAPVAAGAWPVLGHLHLFSGGELPHKMLAAMADKYGPAFTMKFGTHRTLVVSDTKIVKECFTTNDTLFANRPSTMAFHLMTYDNESVAFTPYGQFWRELRKISTLKLLSNHRLQAIKDVRASEVNFCFRTLYNQWRINKSETIGTGDHQGPILVDMKKWFEEVSNNVVIRVIVGKHNFGSKIARGKGEALHYKKVMDEVLRLAAVSMLSDVAPLLGWFDHLQGHVSAMKRNAKEVDTLLCSWMEEHRKKRTSNGSNGVEQDFIDVMLSIVEENKFSGHDSDTVIKATVLAMIMGGTDTSAVSLTWIVSLLMNNRHVLRRAQEELDTHVGKDRQVDDSDLKNLVYLNAIVKETMRLYPLGALLERETKEDCEVGGFHVKAGTRLLVNVWKLQRDPNFWIDPTEFKPERFLTDNANIDVGGQHFELLPFGAGRRVCPGVSFALQFMHLVLARLIHGFELDTPMNANVDMTESTEGHVNHKASALDLLITPRLRSTLYDY

SEQ ID NO: 134 - protein, 571 aa, Chordyalis celanthifolia
MFKSVPSAQAILHKLSFIHQYFLLSQTNMDSLLFQWFPASMAALVAFAFLYKLWSAPKITKNGKTSTKQAPIAAGAWPVLGHLHLFGGGELPHKMLAGMAEKYGPAFTMKFGMHRTLVVSDTKIVKECFTTHDTLFANRPSTTAFHLMTYDQESVAFTPYGPFWRELRKISTLKLLSNHRLQAIKDVRTSEVNVCFRGLYNIWQTNKNEQGGTVSDHPRPVLIDMKKWFEEVSNNVVIRVIAGKQNFGSKIVRGEEEAVKYKKIMDEVLRLAAVSMLSDVAPLLGWLDLFQGNLSAMKRNAKEVDNMLNAWVEEHRRKRLAHSAKVEATHVEQDFVDVMLSIMEENKLSSVHDDDTVIKATVLAMIMGGTDTTAVSLTWTVSLLMNHRYVLKKAQEEIDQHVGKERQVEDSDLKNLVYLNAIVKETMRMYPLGALLERETKEDCEVGGFHVKGGTRLLVNVWKLQRDPNVWIDPTEFKPERFLAENANIDVGGQHFELLPFGAGRRVCPGVSFALQFMHLVLARLIHGFELETPMNADVDLTESTEGHVNHKASPLDLLIAPRLNSKLYEL

SEQ ID NO: 135 - protein, 533 aa, Chordyalis celanthifolia
MDSLFVLLQWFSASLAAVLALAFLYNLWVKPRISDGKGNKGSTKQAPVAAGAWPVLGHLHLFGGSELPHKMLAAMADKYGPAFTMKFGTHRTLVVSNTQIVKECFTTNDTHFSNRPSTTAFHLMTYDNDSVAFTPYGPFWRELRKISTLKLLSNHRLQAIKDVRVSEVNVCFKDLYNQWKTNQNQRPVLVDMKKWFEEVSNNVVIRVIVGKQNFGSKIVRGEEEAVKYKKIMDEILRLAAVPMLSDMAPLLGWLDLFQAHKSAMKRNAKEVDNMLESWLEEHKRKRLSGVNGAEEEDFMDVMLSIMEENKFTGRDSNTVVKSTVLAMIMGGTDTTAVSLTWIFSLLMNNRHALKKAQEELDMHVGKDRQVEDSDLKNLVYLNAIVKETMRMYPLGALLERETKEDCEVGGYHVRAGTRLLVNVWKLQRDPSFWTDPTEFKPERFLTENAKTDVGGQHFELLPFGAGRRVCPGVSFALQFMHLVIARLIHGFELGTPMDADVDLTESTEGHVNHKATPLDLLIAPRLDSKVYDY

SEQ ID NO: 136 - protein, 530 aa, Chelidonium majus
MRSNYLKPTTTTIEDKSKNKISRKKPIAAKPPPEALGAWPVIGHFLLFTGKGLTHVTLGDMADKYGPAFLIRFGSHRTLVVSSWEMMKECFSAPNDKIFSNRESNLLWIKSMFYGSNSYGFSPYGPYWKELRKISTQKLLSHHRLDAMKHLQMVEVDASFKQIYNLCNKNGGSPSPSSINTTALVNMDEWLSHLMFNVIARMVSGYQSDDVGTGATSTGERFKVSMDETMRLMAIFAVSDLVPWLACVDRLRGLTRKMNRCGKDLDSIIGRLIEEHRQKRRLCRNNKGSKNEDGGHDDDQDFIDICLSIMEQSQLPGDNPEIAIKSIVLDMIFAGSHTTTLAMTWTLSLLLNHRHMLKKAKEEIDAHVGNERQVDDSDIHNLVYIQAIIKESMRLYPPSPLFERMTMEDCEVGGFHIPAGTRLFVNVWKMQRDPTVWEDPLEFRPERFLTSKREIDVKGQHYELIPFGAGRRICPGASFTLQVLHLVLARLIHGFEMTTPMDVKVDMASSAGLFSNKMTPLEVLITPRTA

SEQ ID NO: 137 - protein, 557 aa, Chelidonium majus
MKILQEFHQLTISNIVLLLLISFIFFSLSAWFIESTNYYYSSKKKKSKKTPPPEASGAWPVIGHLHQFKPDDLPHEALGDMADKYGPVFIVRFGSYRKLVVSNSEMVKECFTAANDRSFSNRPAVLGIRIMLYNTITYAFAPYGPYWRELRRISSQNLLSNHRVDMVKHLHVDEVNTLFKQLYELCNKNGGRPPTGTNTSTSAALVNMDDWLSNIMFNVIARIVNGNNKSINNERTGAINEKRYKTAMDEARRLVAIFAVSDSVPWLGWLDRVRGLIRGMNLCGKELDSIIEDIIDEHRQKRRLCTSKLGSSGDDDADNSNLEEEDNFIDACLSIEEQSQLPGENPEIVIKALILDMFAGGSDGPHFVLTWTLALLLNHPHVLKKAREEVDAHVANDRHVDVSDISNLVYIQAILKESMRLYPPNALIERMTTEDCEVGGYHIPAGTYLLVNVWKVQRDPTVWQDPSEFRPERFLLTNTKTEMEYEHIPFGAGRRRCPGMRFALQVMHLVLARLIHEFEITTPVDVIKVDMTATNGLFNHKAVPLEVLLTPRTLIRG

SEQ ID NO: 138 - protein, 541 aa, Chelidonium majus
MDYSVLLQYGWFAPSMAALLALAFLYNLFLASSPKATSKRTISTKKPPMAAGAWPILGHLHLFKEGELPHQMLKSMADKYGPAFLMKFGQHRSLVVSDYRIVKECFTTNDTHFCNRPSTTAFDVMTYANESVAFTEYSPYWRELRKISTLKLLSNNRLQAIKNLREEEVNVSFKGLYDSWKNKNNKSTGSVGDERAPVLVDMKKWFEEVSNNVVIRVIVGKCNFGTKIVQGEKEGVEYKTIMDELLRLASLSLLSDFAPILGLLDFFQGHVRTMKRNGKKLDVLLQRWLEEHKRKKSTPEDEQDFMDVMLSVIEESKLSGYDADTVIKATCLAMIMGGTDTSAVSLTWIVSLLMNNRHALKKAREELDAQVGKDRQVEDSDLKNLVYLNAIVKETMRLYPLGTLLERETKEDCEVGGFHLEGGTRLLVNVWMVQRDPSVWTDPTKFTPERFLTEKADIDVWGGNFELIPFGAGRRVCPGVSFALQFLNLVLARLIHGYELGTPDDADVDLTESPEGHLNHKASPLELLLTPRLSNPKLYDY

SEQ ID NO: 139 - protein, 537 aa, Chelidonium majus
MEFLSLEPQLISIFVLLLASSIFLYNLLKNHGRKSKTSKPPAPVASGGWPIMGHLHLFNGSELTHQTLGSMADKYGPAFNIQLGSHQTLVVSSWEIVKECFTTNDRFFSNRPGSLAIKLMFYDADSVGYAPYGAYWRDLRKISTLKLLSNHRVETLKHLRTSEAESCFKQLYNQWKNNKVGGDDDEFAIVRMDNWFGDLTFNVVARIVAGKKNFAGGATSGDVGAKRYKEAMDEAFRLMTIFAFSDVVPSLGWLDKLRGLVGGMKRCGAEIDSIVGGWVDEHRLKRASRKGGDHNDLDLEQDFIDVCLEIMEHSTLPGDDPEIVIKSTCLDMILGGSDTTTVTLTWALSLLLNNPHVLKRAREELDTHVGKDRQVDDSDMSNLVYIQAIIKETMRLYPAGPLIERRTSEDCEVSGFHVPAGTRLMVNLWKMQRDGSVYKEDPLEFRPERFLTSNADVDLKGQNYELIPFGAGRRICPGVSFAVQLMHLVLARLVHGFEMKTAGGAKVDMTESAGLISHKVTPLQVLLKPRLAIQQAL

SEQ ID NO: 140 - protein, 550 aa, Chelidonium majus
MDSMNLFQQAIAVGTLVIFLYYLWKWTSIIFTRTHQAAPPEPAGAWPIIGHLHLLAGGANQLVYHILGSMADKYGPIFTVRLGMRRALIVSNSELAKECFTTNDRIFSTRPSSVAIKLMGYDSAMFGFAPYGPYWREMRKIAVTELLSNRRLEILKNIRISEINMSIKDLYQLWVENKNSGVDGGGDGGEVVVGSPVLVEMKRWFEDVSFNVVVRMVAGKRYFGRRVESDDREEEEARRWQKAMNDFMHLVGIFVVSDAIPFLGFLDFQGYEKEMKKTAVEIDYVMGRWVEEHQRRKLERVAGGSDDQQEDFIDVMLSILKDGDQFYGYDPDTVIKSSCLSLVLGGSDTISVTLTWTVSLLLNNRNVLEKAQSELDIHVGRGRQVDESDINNLKYLQAIVKETMRLYPAGPLSAPREAMEDCTIAGFHVPKGTQLMLNLWKLHRDPRVWSDPLEFKPERFLTTGTHGDVDVKGQHFELLPFGAGRRICPGISYALQVLHLTLARLLHSFHLSTPYDIPVDMTESSGLSCPKATPLDVLLTPRLPSELYVS

SEQ ID NO: 141 - protein, 561 aa, Chelidonium majus
MDLFIFFSRFQYIVGLLAFLTFFYYLWRVSITGTRIKTNQNIMNGTNMMAPEAAGAWPIVGHLPQLVGPQPLFKILGDMADKYGSIFMVRFGMHPTLVVSSWEMAKECFTTNDKFLASRPTSAGGKYLTYDFAMFGFSFYGPYWREIRKISTLELLSHRRVELLKHVPYTEIGGSIKQLYKLWMETQNQNKQRDDHQVKVDMSQVFGYLTLNTVLKLVVGKGLFNNNDMNHEQEEGRKLHETVLEFFKLAGVSVASDALPFLGWLDVDGQKRSMKRIAKEMDLIAERWLQEHRQKRLTSNNKASSGHDDFMSVLLSILDDDSNFFNYNRDTVIKATSLNLILAASDTTSVSLTWVLSLLVTNPGALKKVQDELDTKVGRNRHVEERDIEKLVYLQATVKETLRMYPAGPLSVPHEATQDCTVGGYQVTAGTRLVVNVWKLQRDPRVWPNPSEFKPERFLPDGCEVGCGEAANMDFRGQHFEYIPFGSGRRMCPGIDFAIQIIHMTLACLLHAFEFQVPSSLDKHLVPAVIDMSEGSGLTMPKVTPLEVLLNPRLPLPLYEL

SEQ ID NO: 142 - protein, 522 aa, Cissampelos mucronata
MEAMGEYFQLISWTVFSALITIYFIFSRKTNGKKKAPEPGGAWPIIGHLHLFGAHDLLYRKLGAMADKLGPVFMIRFGMHRAVVVSNYEVAKECFTVNDKILASRPRIIASKLMGYNHAAVGLSPYGPYWREARKIATLELLSNHRLQLLKHIRISEIDMWIKELKEFCMKSSSDGPVLVQLDGWFNALTLNIMVRNIAGKRYCGGAEAFEDEESQRWKKVSRELMFLFGVFMVPDAFPVLEGIDVQGFERAMKRVGKEMDFFLSRWLEEHRRKKIELSEKGNEVNDQGAQDFIDVMLNTIKDAKIFEHDADTMIKATCMALVVAGNDTTMITLSWAVSLLLNNRGVLEKAQEELSNQIGKNRHVEEGDIESLPYLHAIVKETFRLYPAAPLSLPHEAMEDCTIAGFHVPAGTRLITNIWKLHKDPNIWPDPLEFKPERFLTTHAHVDFKGQHFEFIPFGSGRRMCPGSSLAISVLHLTLARLLHEFELKTPDDAPVDMTEGPGITLMRANPLHVLINPRHD

SEQ ID NO: 143 - protein, 534 aa, Cissampelos mucronata
MSSPIQQLLLSLTSINGGTIISAVIISLLLILTLHRLLKPINSNKTKHPPRASGAWPVMGHLHKLRGPDLPHRTLSSMADQYGPIFTINLGPTTALVISDPAVAKECFTTNDLTFSSRPTTLATTLMCYNNTMFGFAPYGPYWREVRKVVMAQLLSTRRLESLKNIWASEIDRWVKGLAQKAQSGSHGVVEVEMGDWLARLTMNIGLRLVVGKSCGEMGSEESERCLGAMREYPELLGRFALEDALPWLGRFDLQGHQREMRRAARVLDEILDGWLDEHKRNRSGLSGGDDHRDQDFMDVMLSVLEQDQDSSLSDHDADMINKSTCLNLILGMADTTMVALTWAISLLLNNKTSLKKAQEELQAQVGNERHVDESDVKNLVYLQSIIKEVLRLYPPEPLSGPREALEDCEVAGYHVPRGTRLIANLWKIHRDSSTWQDSMEFRPERFLTAHEHVDVWGQHFEFMPFGSGRRSCPGVSFEVRVLPLILARLIHAFEMTTRGDVPVDMSERPGLVISKASPLEVMISPRLPLHLFE

SEQ ID NO: 144 - protein, 536 aa, Cissampelos mucronata
MEFHLLLQAVAATLVTFFLYELWALRKKFSRLTKTPSSKALLKAKCAPEPPGAWPIIGHLPLLVSAKQPHRAFAALAEKYGPAFMLRMGMSPMLIVSTKEVAKECYTANDHVFATRPVTTAGKLMAYDHSVMGFTPFGTYWREIRKIATVELFSARRIGMLKPVRQSEVSLWMKGLHEKWVHNGNSSVSVELKSQLEELTFNLLTQMVAGKRYYGSNVAKVDEKMAGLFRHAVQQFNYHLGNSEMYDALPFMAWLDFKGDAKAMKKTQKDLDFIMQTWLDEHRLKADQMRGDAINNTRDFLDVLVMMEKTGQFSSAIKDRDTTIKALALTQLVAGVDSMANTMVWVLALLMNNPEMLAKAQDELDNNVGKDRLVEESDIPNLKYLQALLKETLRMYPVGPLLVPHEATEDCHVAGYFVPRGTGLFINAWTIQRDPNVWAEPNCFNPERFLTTHAEMDVKGQNHELLPFGSGRRSCPGVGLALQVMHLTLARILQAFELKTQSGVGIDLEECSGILLSMMHPLQVMMAPRLPSELYD

SEQ ID NO: 145 - protein, 524 aa, Eschscholzia californica
MDSLILTNWFPISIASVLTLVFLYKVLLSSRTLKDKKIKTSPMANGAWPILGHLHLFGSGELPHKMLATMADKYGSAFRMKFGKHTTLVVSDTRIVKECFTTNDTLFSNRPSTKAFQLMTYDNESVAFTPYGPYWRELRKISTLKLLSNHRLQAIKDVRASEVNVCFKSLYDQCKNPSGAPILIDMKKWFEEVSNNVVMRVIVGRQNFGSKIVQGEEEAIHYKKVMDELLRLASLSMFSDFAPLLGFLDIFQGNLSAMKQNAKKVDAILENWLEEHRKKKNSVAESEQDFMDVMLSIANESKLSGHDADTVIKATCLAMIMGGTDTTAVSLTWIISLLMNNRHALKKAREELDALVGKDRQVEDSDLKNLVYMNAIVKETMRMYPLGTLLERDTKEDCEIGGFHVKGGTRLLVNVWKLQRDPNVWVDPTEFRPERFLTENADIDVGGQHFELLPFGAGRRVCPGVSFALQFMHLVLARLIHGYDLNTLNEENVDLTESPEGHVNHKASPLDLILTPRLHYKLYE

SEQ ID NO: 146 - protein, 532 aa, Eschscholzia californica
MDTASSISLLLPWAVVVPSIATLLALLLFLFITSPKTPKRKTSSKPPPTVLPGAWPILGHLHLFKEGESPHHMLKNLADKYGPAFVMKFGQHRSLVVSNTKIVKECFTTNDTLFSNRPSTTAFDLMTYAHDSVAFTPYSPYWRELRKISTLKLLSNNRLKAIKKLRGEEVDVCFRGLYGLWKNKTKNGAPVLVDMKKWFEEVANNVVIRVIVGKLSFGTKIVDGEEEAVEYKTVMDELLRLASLSLLSDMAPILGWLDFFQGSVRKMKQTGKRLDVLLEKWLGEHREKKNLVGEDEQDFMDVMLSIVEESKLSGHEADAVIKATCLAMIMGGTDTTAVTLTWIISLLMNNRHALEKAREELETHVGKDRQVEDTDLQNLVYLSAIVKETMRLYPLGTLLERETKEDCEVGGFHIQGGTRLLVNIWMVQRDPTVWNDPSAFKPERFLTDKSEIDVGGQHFELIPFGAGRRVCPAVSFALQFLHLVLARLIHGYDLGTPSNVEVDLTESLEGHVNHKASPLELLLTPRLNPKLY

SEQ ID NO: 147 - protein, 548 aa, Eschscholzia californica
MESEIQYQTATMASILSTNLILSSIFTAFLLYFLLKMSPFRSSKNKSRKQAPKPTGSWPIIGHLLHLQGPNLPHINLAALADKYGSVFSFRIGLRPALVVSSWEIAKECLTTNDRVFVSRPPLIAMKHMGYDHALFGFSPYGPYWRELRKLVNQELLSNTRIELIKHVWDTEINTFINDLYEVWAMKSNEGGGDVVVEMKQCLYDFTLNLTLKILTGKRYFGGGGSEELREEAGRCQKAVRNFLRLVGTFTAQDVIPFLEGWLDLGGHEKEMKITGKELDSLLQKWLEEHKVKKSSAGEEGQENRGGDEEDFMGVMLTKLRDHEKLLSYYDADTINKATCLTVILGGSDTTMMTLVWALALLVNHPHVMKKLQDELDTHVSKERQVEESDIKNLAYLQSVMKETMRRYPGTPLYVRESIEDCTIAGYDVPTGTRLVVNAWKIQHDPQVWSNPFEFNPERFLTTHKDIDVRGQNFELIPFGAGRRMCPGASLGLQVVHLTLARLVHGFEFKTPDGEPMDMTESIGLTNLKATPLEIMLTPRLSSKLYVC

SEQ ID NO: 148 - protein, 554 aa, Eschscholzia californica
MGLSFDLSSHNFLQFSNPTILIGLFGLLVYLLLVNLRKRISRKNEAPEVEGGWPIIGHLHHFMGGKNKLLHVAFGAWADKYGPVYTLRMGLNKVLVVNSAEVAKECSTTNDMLFMARPYRIASEIMGYGYAMFPIAPYGPFYLKMRKMVTQELLSNSRVDSLKHVWGSEIKNAIQELHKKVLSTKGGGPISMDMKGWVSNLTFRTAMKVICGGVGVDGGGGGGGATSPATSIGEHNYDEVGSFQKALKEFFVLLGEIRISDVIPFLGWLDMRTGYVEKMKDNGKFLDNLMEEMLEEHKRKRRSLTEEEEKDGGYVEQDFMDVMISKLNDPKLLSYYDADTINKSTCLTLILSGSETTMVSIVWALALLVSHPHVLKKAQDELDTLVGRERQVDESDIKDLVYLQAVVKEALRLFPPAPLSTPRVATEDCVVSGYHVPAGTQLFVNTWKIQRNPEVWPEPSEFRPERFFTTHKDFDVRGLHYDLHPFGSGRRACPGAGFALQVVHLTLASLLHGFEIKNPSDEPIDMTESPGVTNLKATPLKVLLTPRLFSKEVY

SEQ ID NO: 149 - protein, 561 aa, Eschscholzia californica
MEKPILLQLQPGILGLLALMCFLYYVIKVSLSTRNCNQLVRHPPEAAGSWPIVGHLPQLVGSGKPLFRVLGDMADKFGPIFMVRFGVHPTLVVSSWEMAKECFTSNDKFLASRPPSAASIYMAYDHAMLGFSSYGPYWREIRKISTLHLLSHRRLELLKHVPHLEIHNFIKGLYGIWKDHQKQQQQPTARDDQDSVMLEMSQLFGYLTLNIVLSLVVGKRVCNYHADGHLDDGEEAGQGQKLHQTITDFFKLSGVSVASDALPFLGLFDLDGQKKIMKRVAKEMDFVAERWLQDKKSSLLLSSKSNNKQNEAGEGDVDDFMDVLMSTLPDDDDSFFTKYSRDTVIKANSLSMVVAGSDTTSVSLTWALSLLLNNIQVLRKAQDELDTKVGRDRHVEEKDIDNLVYLQAIVKETLRMYPAGPLSVPHEAIEDCNVGGYHIKTGTRLLVNIWKLQRDPRVWSNPSEFRPERFLDNQSNGTLLDFRGQHFEYIPFGSGRRMCPGVNLATPILHMTLARLLQSFDLTTPSSSPVDMTEGSGLTMPKVTPLKVLLTPRLPLPLYDY

SEQ ID NO: 150 - protein, 565 aa, Eschscholzia californica
MNLSSKLMGSFDLFSLNFLQFSKPASMVIIGICSFLVYFSLLNLVRRVLAPSCTMKNGKTEPPEVENGWPIIGHLHHFMGKKNKLIHEIFGDMADKYGPTFTLRMGLTKVLVVSSAEVAKECLTTNDLVFIGRPPRVANSLLGYSFAMFPFSPYGTYYSQMRKIVTHELLSTSRVESLKHVWNSEINKAIQELHHKVVSVGGGSPVLIEFKRWFSDLTLRTTVKLICGKQYFGTDGATQASMTINGGGDDDEAGKFQEALREFFCLLGKFRVSDVIPFLGWLDFGTGYKEKKNRMFIDSLMEEWLEEHKMKRRLLNEADKKESRIEQDFMDVMISKLDDPNLLSHYDADTINKATCLTLILGGSDTTMVSLVWALTLLMNHPHVLKKVQDELDFHVGRERQVEESDMKNLVYLHAVMKEAMRLNPAGTLSAPRMSTKDCTVSGYHIPAGTHLFMNTWKIQRDPNAWVEPTEFRPERFLTTHKDFDLRGQNFELLPFGSGRRSCLGANFALQVLRQTLARLLHGFDLKTPSDEPVDMTGSAGLINMKATPLEVLVTPRLFSSELYG

SEQ ID NO: 151 - protein, 550 aa, Eschscholzia californica
MNLLIFFQFLLQFQVLVGLSVLLAFSYYLWVSKNPKINKFKGKGALLAPQAAGAWPIVGHLPQLVGPKPLFRILGAMADNYGPIFMLRFGVHPTVVVSSWEMTKECFTTNDRHLASRPSNAASQYLIYEVYALFGFSLYGSSYWRDARKIATLELLSHRRLELLKHVPYTEIDTCIKQLHRLWTKNNKNQNNPELKVEMNQFFTDLTMNVILKLVVGKRFFNVDDAADHEKEEARKIQGTIFEFFKLTEGSVSAGALPLLNWLDLNGQKRAMKRTAKKMDSIAEKLLDEHRQKRLSKEGVKGTHDHNDFMDVLLSILDADQGDYSHHPFNYSRDHVIKATTLSMILSSMSISVSLSWALSLLLNNRHVLKKAQDELDMNVGKDRQVEEGDIKNLVYLQAIVKETFRMYPANPLLLPHEAIEDCKIGGFNVPAGTRVVVNAWKLQHDPRVWSNPSEFKPERFLNDQAAKVVDVRGQNFEYLPFGSGRRVCPGISFSLQTIHMSLARLVQAFELGTPSNERIDMTEGSGLTMPKTTPLHVLLNPRLPLPLYE

SEQ ID NO: 152 - protein, 532 aa, Eschscholzia californica
MEFHFPLMEQFQPFFIFALLLASFIFLYKLFNFGNRITKNGKPTAPEASGGRLIMGHLHLFNGTELTHRTLGSMADKYGPAFNIRFGSHKTLVVSSWKIIKECFTTNDRFFSNRPGSLAIKLMFYDADSVGYAPYGSYWRELRKISTLKLLSNHRLETLKHLRTSEVDSCFNQLMNSWAENKNRGDSDFAPVRMDDWFGDLTFNVVARIVAGKKNFAGGAARGDAGAQRYKSAMDEAFRLMTIFAYSDVIPSLGWLDKLRGLVGDMKRCGSEIDSVVESWVDEHRLKRRVSKKGGELDLEQDFIDVCLDIMEHSSLPGDDPEIVIKSTCLDMILGGSDTTTVTLTWALSLLLNHPQVLKRAKEELDSQVGKERQVEDSDIPNLPLIQAIIKETMRLYPAGPLIERRTMEDCEVAGFHVPAGTRLLVNLWKMQRDKEVWSEEPLEFRPERFLTSNTEVDLKGQHYELIPFGAGRRICPGVSFAVQLMHLVLARLLHGFEMTTPMGEKVDMTESAGLISHKITPLEVLIKPLRV

SEQ ID NO: 153 - protein, 510 aa, Eschscholzia californica
MDSFLLAYWVPISVASIIAFVFLYNLFSSRTLQNKKIRTAPMATGAWPILGHLHLFGSGELPHKMLAAMADKYGSAFRMKFGKHTTLVVSDTRIVKECFTTNDTLFSNRPSTKAFQLMTYDNESVAFTPYGPYWREIRKISTLKLLSNHRLQAIKDVRASEVNVCFKTLYDQCKNPSGSAPILIDMKKWFEEVSNNVVMRVIVGRQNFGSKIVQGEEEAIHYKKVMDELLRLASLSMFSDFAPLLGFVDIFQGNLSAMKRNAKKVDAILENWLEEHRKKKNSVAESQQDFMDVMLSIVEESKLSGHDADAVIKATCLAMIMGGTDTTAVSLTWIISLLMNNRHALKKAREELDALVGKDRQVEDSDLKNLVYMNAIVKETMRMYPLGTLLERETKEDCEIDGFHVKGGTRLLVNVWKLQRDPNVWVDPTEFRPERFLTENADIDVGGQHFELLPFGAGRRVCPGVSFALQLHAFSTCSPHPWIRFEYSKRRKCGSDGEPRRTCEPQSIAS

SEQ ID NO: 154 - protein, 534 aa, Glaucium flavum
MEFLSLQLQPVSIFALLVASIFLYNFLIHGKKSNNKKTTKPPAPEASGGWPIMGHLHLFNENELTHRTLGSMADKYGPAFNIRFGSHPTLVVSSWDIVKECFTTNDRFFSNRPGSLAIKLMFYDADSVGYAPYGAYWRDLRKISTLKLLSNHRLETLKHLRTSEVESCFKELYNQWRNNKTGGGGDGFAPVRMDNWFGDLTFNVVARIVAGKKNFAGGAASGDAGAQRYKEAMDEAFRLMTIFAFSDVVPALGWLDKLRGLVGGMKRCGAEIDSIVAGWVDEHRLKRSSGKGSDADLEQDFIDVCLEIMEHSTLPGDDPEVVIKSTCLDMILGGSDTTTVTLTWALSLLLNNPHVLKRAREELDTNVGKDRQVDDSDIPNLVYIQAIIKETMRLYPAGPLIERRTSEDCEVGGFHVPAGTRLLVNLWKMQRDGSVYKEDPLEFSPERFLTSNADVDLKGQNYELIPFGAGRRICPGVSFAVQLMHLVLARLIHGFEMKTPEGGKVDMTESAGLISHKVTPLEVLLKPRLAIQHS

SEQ ID NO: 155 - protein, 561 aa, Glaucium flavum
MHAKLTLIKKMEFTIINSLEIQPIISTFALLTFSILLYKILLNHGRENKNNKPKTSSSSSSIPEVAGAWPIMGHLHLFNGDELMHHKLGSMAEKYGQAFYIRFGSHKAVVVSNWEMVKTCFTTNNQIFLNRPPMLAINLLFFPTDSLSYIPYGDHWRELRKFSNQKLLSNHRIETQKNLRKLEVDYCFKQLCNQSSKYFIINNMDDQDSKFALVRMDTWFDDVTLNVLARIIAGKKKFISGGATSSGDDDNAEARRYMEALDEGLRLMTSFTFSDVLPWLGWLDNLRGLAGKMKRCGAELDSVFAGWVEEHRVKRGSRKDGDDADLEQDFIDLCWESLEQVPGNDPAKIIKLICMEMILNGSGATAVTLTWTVSLLLNNPDVLKRAREELDTHVGSHRQVDESDIPNLVYIQAIIKEGMRLYPPGPFLERSTTEDFEIDGVHVPAGTRLWVNLWKMHRDESMYQEPLEFKPERFLNSNSDVDLKGQSYQLLPFGAGRRICPGVSFALPLMHLTLARLIHGFEMKLPVGVEKVDMTENGGIINRKATHLDVLLKPRLIAQQA

SEQ ID NO: 156 - protein, 536 aa, Glaucium flavum
MDTLSIQWIVPSIATLLALVFLYNLIFTSKKTTKTNNTRKAPMASGAWPVLGHLHLFGTGELPHKMLATMAENYGTAFTMKFGNHTTLVVSDTRIVKECFTTNDTLFANRPSTKAFDLMTYANDSVAFTPYSPYWRELRKISTLKLLSNHRLQSIKDVRVAEVNVCFRGLHVLCKSKIYGAPVLVDMKKWFEEVSNNIVMRVIVGKQNFGSRIVQGQEEAVYYKSVMDELLRLASVSVLSDFAPLFGWLDFFQGNISAMKRNGKKLDVILERWMEEHRQKKISSSSSIAASGAGEDDEQDFMDVMLSIIEETKLSGRDADTVIKATCLAMIMGGTDTTAVSLTWIVSLLMNNRHVLKKAREELDSLVGKDRQVEDSDLKNFVYMNAIVKETMRLYPFGALLERDTKEDCEVGGFHVEAGTRLLVNVWKLQRDPNVWKDPLEFRPERFLVENVDIDVGGQHFELLPFGAGRRVCPGVSFALQFMHLVLARLIHGYELETLNGEDVDLTESTEGHVNHKASPLDLLITPRLDSKVYNY

SEQ ID NO: 157 - protein, 532 aa, Glaucium flavum
MDSTLVLQCFVGSMAAVSALVFLYNLIFSSSKTTKGKVLRKAPMAAGAWPILGHLHLFGSGELPHKMLSKMAEKYGPAFTLKFGKHTTLVVSDTRVVKECFTTNDTLFANRPSTTAFDLMTYANDSVAFTPYSPYWRELRKISTLKLLSNHRLQSIKEIRVSEVNVCFRELFEMSKSKTDGAAPALVDMKKWFEEVSNNIVMRVIVGRQNFGSKIVQGDAEAVNYKNVMDELLRLASLSMLSDFAPLLGWVDMFQGNKNAMKRNAKKVDTILEGWLEEHRKKNKKMSSSENDEQDFMDVMLSIIEETKLSGRDADTVIKATVLAMIMGGTDTTAVSLTWIVSLLMNNRHVLKKAREEIDAIVGKDRQVEDSDLKNFVYMNAIVKETMRLYPLGAMLERDTKEDCEVGGFQVQAGTRLLVNVWKLQRDPNVWSDPSEFRPERFLSENADIDVGGQHFELLPFGAGRRVCPRVSFALQFMHLVLARLIHGYELGTQNDELVDLTESTEGHVNHMASPLDLILTPRLSNPKLYDY

SEQ ID NO: 158 - protein, 518 aa, Glaucium flavum
MFFTSSSKTTNKNTSKKPPMAPGAWPILGHLHLFKEGELPHHMLKSMADKYGPAFLMKFGQHRSLVVSDYRIVKECFTTNDTLFSNRPSTTAFAVMTYATDSVAFTEYSPYWRELRKISTLKLLSNNRLQAIKKLRESEVNVCFRGLYDSWRKNKSEQNGAGNSIDGGNERARPVLVDMKKWFEEVSNNLVMRVIVGKRNFGTKIVEGEKEAVEYKTIMDELLRLASLSLLSDFAPILRLFDHFQGHIRTMKRNGKKLDVLLQRWLEEHRRKMSTPEEEQDFMDVMLSIVDESKLSGHDADTVIKATCLAMIMGGTDTSAVSLTWIVSLLMNNRHALAKAREELDKHVGKDRQVEESDLKNLVYLHAIVKETMRLYPLGPLLERETKQDCEVGGFDIAGGTRILVNIWMVQRDPAVWNDATEFIPERFLTEKSDVDVWGGSFELIPFGAGRRVCPGVSFALQFLHLVLARLIHGYELKTPNDMPVDLTESTEGHVNHKASPLDLLLVPRLSDLKLYDY

SEQ ID NO: 159 - protein, 537 aa, Glaucium flavum
MDSILTTVVLLSILLYFLFSWQLNKYSATKKNTKSSKQLPPEPAGSWPVIGHLHLLAKGSNLPHINLGAMADKYGPIFMIRIGLNPTLVVSSWEVAREIFTTNDQVFSSRPIQVSTKHLGFDTAMYGFAPYGPYWREISKLVKREVLSNTRLEFLKPVWGSEINTSIKELYDVCVMKNKEEGGTGPIIVEMKQWFSDLALNMSVKLVAGKRYFGASQLGNEEAARWQKALRNCFRLVGLFVVSDAIPFLRWLDVGGHEKEMKNTAKELDDLLEGWLEEHKMKKKLSLSEVEAEKKERDRVDFMDVMLSTLEHEKASDYFPADTINKATCLALILGGTDTTTVVWVWALALLVNNPNVLKKAQDELDVHVGKKRQVDESDIKNLTYLQAIIKESMRLYPAATLGIRESTEDCTVAGYHIPAGTSLIVNSWKIQHDPQVWTDPFEFQPERFLTGHMDVDIRGQSCKFLPFGSGRRSCPGTSLALQMVTLTLARLIHGFEFRTPSEAPTDMTESAGLTNVKATPLEVLVSPRLPSELYVC

SEQ ID NO: 160 - protein, 537 aa, Glaucium flavum
MELINSLEIQPITISILALLTVSILLYKIIWNHGSRKNNKSNKNNRKTSSSAGVVEIPGAWPIIGHLHLFNGSEQMFHKLGSLADQYGPAPFFIRFGSRKYVVVSNWELVKTCFTAQSQIFVSRPPMLAMNILFFPKDSLSYIQHGDHWRELRKISSTKLLSSHRVETQKHLIASEVDYCFKQLYKLSNNGEFTLVRLNTWCEDMALNVHVRMIAGMKNYVAAPGSGEYGGQARRYRKALEEALDLLNQFTITDVVPWLGWLDHFRDVVGRMKRCGAELDSIFATWVEEHRVKRASGKGGDVEPDFIDLCWESMEQLPGNDPATVIKLMCKEHIFNGSGTSSLTLAWILSLIMNNPYVIKKAREELEKHVGNHRQVEESDLPNLLYIQAIIKEGMRLYTPGPFIDRNTTEDYEINGVHIPAGTCLYVNLWKIHRDPNVYEDPLEFKPERFLKNNSDLDLKGQNYQLLPFGAGRRICPGVSLALPLMYLTVSRLIHGFDMKLPKGVEKADMTAHGGVINQRAYPLEVLLKPRLTFQQA

SEQ ID NO: 161 - protein, 571 aa, Glaucium flavum
MDLQIFFHFQGIVGSLALLSFFYYLWRLLTTTKTSICNGTTAAPPEVSGGWPILGHLLQLVGSKQPLFKVLGDMADKYGPIFVVRFGMYPTLVVSSWEMAKECFSTNDRVLATRPTSAASKYLTYNYAMFAFTFYGPYWREIRKISTIELLSHRRVEMFKHVPFMEIDTCIEQLYLLWMQNQNQNQNQPNGDPVQVNMSKVFEELTMNAVLKLVVGKRLTDDKEGEKLHKTIQEFFKLLEVSVASDVFPFLGWLDVDGQKRKMKRVAKEMDIIAEKWLEEHRQKRSSKLEEEEEEEEDDGGGKGDAAAADKDFMDVLLSLLEGDEGDSDQPFMNYSRDTVIKATSLNILVAATDTTSPTLTWAISLLLNNPHVLREAQNELDMKVGRDRQVEEQDIENLIYLQAIVKETLRLYPAGPLSIPHEAIQDCKLGGYHVRAGTRLLLNIWKLHRDPRVWSNPLEFKPERFLILSEEVCGCSRGTQNFDFKGQCFEYIPFGSGRRMCPGYNFGIQIIHMTLARLLQSFEMQPAKAKSLNDQDGPVDMREGSGLTLPKITPLKVLLTPRLYGQLYNH

SEQ ID NO: 162 - protein, 534 aa, Hydrastis canadensis
MDFSMLFQWLLVTMATLLFLNSVYNVWYKSSKNTSITTTTSKGKKAPVAAGARPFMGHLHMLVGGKQLPHQALGKLADIYGPAFIIHIGPNPELVVSSWELAKECFTTNDKYFANRPTNKAMKYLTYDEASVGFGPYGPLWVEMRKIAKSNLLSQQRLQMHKRVRVLEIDAFFKELHELWSMKKEDGPVSVDMKQWFEELTLNVITRMVSGKHKYATKARRGDSEAKQFKRVIGEAAHFTGNLLLSDIFPSLGFLDNMQGRVNSMKRTGKELDSILSSWVEEHRQKKLSGEQSEDEEKDFIDLTLSMMDEIQLHSTDSETFIKAICVGVILGGSDTTSVGITWILSLLMNHRDVLKKAQEELDQQVGMDRKVEDSDLNNLVYLRAIVKESMRLYQVGPLIERKASQDCTIGGFHVKAGTRLLVNLSKVHKDPTVWSDPLEFQPERFLTTHSNMDLKGQHFELLPFGSGRRMCPGYLFALNEMYLVLARLIQGFELGTPMDAKVDMTETSSVTNYRATPLQVLLTPRLSPKLYDY

SEQ ID NO: 163 - protein, 528 aa, Hydrastis canadensis
MAFVALIVVYNIWFKSAASRNKTSYNNKTMSKTPVVDGAKPIIGHLHLLMGGDLPHHALGRLADKYGPIFLMHIGAFPELVVSSSELAKECFTTNDKYIINRPTNKAMTYLSYEQASVGFAPYGPLWIEMRKISKSNLLSNQRIHMQKQVRVAELDAFFKELYQLCRSNDENNNNSTSHGKVLVEMNKWFEELTLNVVTRMICGKQKMGTKARLGDSDAKHYKKTIDEAAHFMGNLVISDVVPCLGMLDNLLGHVSAMKRTGKELDTIFGSWVEEHQQKIRLSGYKDDAEEEEHDFIDLTLSMMKGSTDLHGLDPATFIKSICVGMILGGTDTTSVALTWILSLLLNNRHILKKAQEELDHQVGKERKVEDSDLNNLVFIGAIVKESMRLYPVGPLIEREAIEDCQIGGVHVKAGTRLLINIWKVQQDPKIWPNPSEFRPERFLDSNMDVKGQHFELIPFGSGRRMCPGMSFAINELNLVLARLLQGFELETPMNAKVDMTETSSVTNYKGTPLQVLLTPRLSSKLYM

SEQ ID NO: 164 - protein, 531 aa, Hydrastis canadensis
MEYSHLLPWLATSIAAIFAFIFLFYVRRRKNNKAFIHNHAKKAPVVPGALPFLGHLRLFTGPILPHKALGALADKYGPAFTIYLGSHQTLVVSGRELVKECFTTNDRLFSNRPRSKAVKYLTYDEASVGFAPYGPLWVEMRKVSKLNFLSNQRIQMQKQALASELNFCFKDVYQLWLKNKELPVMVDMTKWFEEMTLNVITRLICGKQNYGSKANSGESEAKRYKQVVEKAAHLTSTVVMSDVFPFLEWFDKFQGQEKVMKKVANEFDSILGSWVDEHRRKRLLRGNNEEEEEEQDFIDLSLAMMEETQLHGVDPDTFIKSMCLGMILGGGDTTPVALTWALSLLLNNPDIMKKAQEEIDQVIGKERKLDGSDISNLVYLQAVVKESMRLYQVGPLIERETTEDCKIGDFHVEAGTRLLVNIWKVQQDPCVWSNPTEFQPERFLSSKSDMDLKGQHFELIPFGSGRRMCPAVASALQMMHLVLAKLIHGFELGTPMNAKIDMTETSSITNNMATHLQVLLNPRLNANLYDF

SEQ ID NO: 165 - protein, 543 aa, Hydrastis canadensis
MADFTMLLQWLLLTMATLLFLNAVYKSIKSSKNTINDTSFKKGKKAPVAAGARPFIGHLHMLVGGKQLPHQALGKLADKYGPAFIINIGPNPELVVSSWELAKECFTINDRCFTDRPSNKAMKYLTYDEASVGFAPYGPLWVEMRKIAKSNCAFQQRLQVQKRVRVLEIDLFFKELHELWSHAGAGATGTSVIPLSIDMKKWFEELTLNVITRMVSGKHNYATKARKGDTEAKRFKRVISEAAHFTGRLLLSDIFPSLGFLDNMQGRVNSMKRTGKELDSVLSSWVEEHRQKRVSGNKEQSPEDDDVEQDFIDLTLSMMEEIQLHWTDADTFIKAICVGVILGGSDTTSVGITWILSLLMNHPDVLKKAREELDQQVGLERKVDDSDLNNLAYLRAIVKESMRLYQVGPLIERKAKQDCNIGGFHLKAGTRLLVNLSKVHKDPTVWSDPNEFRPERFFTTHTNIDIKGQNFELIPFGSGRRMCPGYLFALSEIYLVLARLIHGFELRTPNDAKLDMTETSSVTNYRATPLQVLLTPRLSSKLY

SEQ ID NO: 166 - protein, 532 aa, Hydrastis canadensis
MDYFSMPYQWLLTSLATLIVFVFIWSITAGKTSTTSNKAKKAPPIAAGAWPIIGHLHLIMGGELPHRLLSNLADKYGPIFMLNYGSQPGLVVSSLKLAKECFVHNDRAVFKRPNSKAMKYFTYDQASFGFAPYGPLWVEMRKVSKSNLLSNQRLQLQRNQRASEVDAFIKELYQLCKKSNNGTLMVEMNKWFEELTLNVVTRMVCGKKNIGAKARHGGDNEAKYYKKVIDEATIFTAKLVASDFFPSLGWVDYLHGDESAIKQTAKELDSIIGSWVEEHRQKRLLSLNKDDYAEQDFIDITLSMIDQTQHQGIDADTFVKSMCVGMIFGGSDSTSVALNWALSILMNNRHVLKRAREEIDTLVGKDRKVNDVDVTKLVYLKAIVKESMRLCLVGPLLERVTVEDCEIGGFYVKAGSRIVVNIWKLQHDPDLWSDDVMEFRPERFLTTNSNVELRGQHFELIPFGSGSRMCPGVTFALELMHLTLARLIHGFELGTPMDAKVDMTETSSVTNYKATPLEILLTPRLHPKLYDF

SEQ ID NO: 167 - protein, 534 aa, Hydrastis canadensis
MFISITQQSMDSFHQYLATIIFGVFSFVLFLIYYLPLKRSRSDKKRAAPKPVGAWPIIGHLPMLSRHQPPHITLGNIADKYGPAFTLQLGVHRALVVSSSEVAKECFTTNDKALASRPSSVALKLMGYNNAMFGFGPYGSYWRQMRKIVVLELLSNHRLQLLKHVRISEVSTSLKELYQVWASCTNKNDKGQVLVDMQQWFGDLTLNVSVRMIAGKRYFGASAACDEDEARRFQKAIKDFLHLVGLFVVSDALPFLEWLDIQGHQKAMKRTFKELDRILGKWVEEHRRNKLDGGTNVGRDFMDVMSSILDDANISDYDADTINKATCLSLILGGTDTTMVTLTWALSLLMNNQHILKKAQDEIDIYVGKDKNVDESDIEKLVYLQAIVKETLRLYPAGPLSGPHEAIEDCTVAGYHVPRGTRLITNLWKIQRDPRIWSSPCEFQPERFLTTQANVDVRGQHFEFLPFGSGRRSCPATSFALQVVHLALARVLQGFEFETQSNAPVDMTESAGLTNVKATPLEVLITPRLPLNLY

SEQ ID NO: 168 - protein, 529 aa, Hydrastis canadensis
MESLHQYLAAVMSCIFALLLFLYYFPWKIRRSSSDNNMRSAPEAAGAWPIIGHLPMLGGHQLPHITLGNLADRYGPAFTIRLGVCRALVVSSSEVAKECFTTNDKAFATRPSSVAVKLMGYNYALFGLAPYTSYWREVRKIVILELLSNRRLELLKHVRISEVNTSIKELFQVWASSNNKNEKGQVLVEMQRWFGDLTINVAVRMVAGKRYFGASVNTCDDEEEARRFQKAIKNFFHLVGLYVLSDSLPFLEWLDFEGHQKAMKRTFKDVDCILQRWLEEHRRDKENGAMKEERDFMDVMLSILKDANLFGYEADTVNKATSLNIILGATDTTMVTLTWALSLLLNNRHILKKAEDEIDIHVGKDKAVDESDIEKLVYLQAIVKETLRLYPVAPLLAAHEAIEDCIVAGYHVPRGTRLIPNIWKIQRDPRIWSSPCDFQPERFLTTQANVDVRGQHFELFPFGSGRRMCPGISFGLQVVHLALARVLQGFEFDTPSNKAIDMTESAGLTNLKATPLQVLITPCLPLNLY

SEQ ID NO: 169 - protein, 530 aa, Hydrastis canadensis
MDSILLPTPLMVSLFALLLCLYYLIISRPRSSHNTSTKEAPEAAGALPIIGHLHLLGGRILPHITLGAMADKHGPAFMIRIGVHRALVVSSSEVAKECFTTNDKAFASRPKHTAAELMGYNYAMFGFAPYGPFWSEMRKIIMAELLSNRRLELLKYIRDFELKASIKELYMTWENHSVTNKGQVVVEMKKWFGDLTLNVILRMIAGKRYFGSNSTCDESEAKICQKGMRDFFRLLGEFLVEDAIPYLGWLDLQGFKKEMKNTAKELDILLQGWLEEHKKKREFSKDVKEEQDFMDVMMTILEDANFSDFDADTINKATCLTIISGGSDTTMLTLTWALSLLLNNQHVLKKAQDELDTHVGRDRRVDESDIKNLVYLNAIVKETLRLYPASPLLGIRVSTEDCTVAGYHVPSGTRLMVNAWKIQRDPLVWSDPFEFRPERFLTTHVNVDVKGQNFNLIPFASGRRVCPGVAFALQMLPLVLAHLLHGFKLMTQLGGPVDMTESTGLTNIKATPLEVVISPRLRPELYEMYT

SEQ ID NO: 170 - protein, 525 aa, Hydrastis canadensis
MESLHQYLATILSCIFAFLLFLYYFPWKGRRSFDNNLRTAPEAAGAWPIIGHLPMLNQRDLPHVTLGNLADRYGPAFTIRLGVRRALVVSSSEVAKECFTTNDKAFATRPSSVAVKLMAYNYAVFGFGPYGSYWREMRKIVILELLSNRRLELLKHVRISEVNTSIKELYQVWASNNKNEKGQVLVEMQRWFGDLTMNVVVRMVAGKRYFGASVTCDEEEARRFQKAIRDFSHLAGLYVLSDALPNIEWLDFEGHHKAMKKTFKDLDCILQRWLEEHRRDRENGATKGERDFMDVMLSILKDANPFDFEADTVNKATSLNMVLGGTETTTVTLTWALSLLLNNQHILKKAQDEINIRVGKDKPVDESDIEKLVYLQAIVKETLRLYPVLPLSVPHEAIEDCTIAGYHVPRGTRLITNLWKIQRDPHIWSSPCEFQPERFLTTQANVDVRGQHFELFPFGSGRRMCPGISFGLQVVHLALARVLQGFEFETPSNVPMDMTESAGLTNFKTTPLEVLITPCLPLDQY

SEQ ID NO: 171 - protein, 525 aa, Hydrastis canadensis
MDSLLQLQIIGALAALIFTYKLLKVICRSPMTDGMEAPEPPGAWPIIGHLHLLGGQDPIARTLGVMTDKYGPILKLRLGVHTGLVVSNWELAKECFTTNDRVLASRPMGAAGKYLGYNYAIFGLAPHGPYWSEVRKIVLRELLSNQSLEKLKHVRISEINTCLKNLFSLNNGNTPIKVDMKQWFERPMFNVVTMMIAGKRYFSMENDNEAMNFRKVATEFMYLTGVFVVSDALPYLEWLDLQGHVSAMKRTAKELDIHVGKWLEEHRRAKLLGETKNEDDFVDVLLTILPEDLKDNQTYIHDRDTIIKATALALFLAASDTTAITLTWALSLILNNPDVLKRAQDELDKHVGKEKLVKESDIINLVYLQAIIKETLRLYPAAPLLLPHEAMEDCTVGGYHVPKGTRIFVNIWKLQRDPRVWFDPNEFRPERFLTTHANVDFKGQHFEYIPFSSGRRVCPGITFSTQIMHLTLAHLLHEFNIVTPTKSNAGVDMTESLGITMPKATPLEVLLTPRLPSNLYNQYRD

SEQ ID NO: 172 - protein, 521 aa, Jeffersonia diphylla
MDSLQLIASVVCGLFAFLRIYYLLKKLSSNKEAPQLGGAWPIIGHLHLLGRVELPHIFFSAMADKYGPAFMIQLGMRRALVVSSAEIAKECLTTNDKALATRPSSIAAEIMGYDYAMFGLGPYGDYWREVRKIVVLEFLSNRRLELLKHVRVSEISLSLKELYQSWEKQNKADEPVLVHLDQWFGDMTLNLSVRMVAGKRYFGATAACGEDESRKVQKATREFDRLLGLFVVSDYLPFLRWLDLEGHQKLMKSIGRELDSILQGWLDEHKTRRNSGGGAKGDQDFIDVMLSVLEDGNLSNYDADKLNKATSLTMIVAGSETTMVTLTWAVCLLLNNPEVLNKAQDELDMHIGKDRQVEESDIKNLAYLQAVIKETMRLYPVAPLLIPHEAMEDCTIAGYHVRAGTRVILNGWKLQRDPFIWSDPCEFQPERFLNNDVDVRGRHFELLPFGSGRRACPGISLALNVVSLTLARLLHEFKFSNPSEGKVDMSESAGVVVAKATPLEVLIIPRLPSKFYEYYKL

SEQ ID NO: 173 - protein, 518 aa, Jeffersonia diphylla
MFSLQLLSTPLFGFFTLLAIYYLLWTKSNKTKEAPQPAGAWPIIGHLHLLARSELPHITLGAMADKYGPAFMIRLGTRQAIVVSNSEIAKECLTIKDRIFATRPSLVAFKLMGYNSAMVGLSPYGPYWRELRKIIALKVLSQRRLESLKDVWDSEISSSLNHLHQIWSHQTEPNGKILVEMDQWFGDLTLNVAVKMVAGKRFFSADAACDENESRRCQKAIREFFRLLGQFVVSDSLPFLGWLDLEGYQKEMKSTAKEVDSILQKWLDEHKQKRQSAGADRDQDFMDVMLSLLEDASLSQYDTDTINKATCFSMIVGGSDTTKITLTWALTLLLNNPDVMKKSQDELDIQVGKDRHVEESDIKNLVYLEAIVKETLRLYPAAPLLAPHEATEDCIVAGYNVRAGTRLIVNAWKIQRDPLIWPNPSEFLPERYLNKDVDVKGQHFELIPFGSGRRACPGITFGLQVVSLTLARLLHEFEISIASGIKVDMTESGGLVTAKATPLKALIAPRFLYSHHHI

SEQ ID NO: 174 - protein, 525 aa, Mahonia aquifolium
MNSLQFLATPLLTLIALLCVYCIVWRKSFSRNGSKIKQAPWAGGAWPIMGHLHLLAWGDLPHITLGALADKYGPVFMMQLGMRQAIVVSSAEIARECFTTNDRILATRPSSIAVKLMAYNYAMFAFAPYGPNWREIRKTVMLELLSTPRLESLKHVWEDEISTSVKELYELCASKTKTHGHVSVDMKQRFGDLTLNVLVKLVNGKRYFGANTDYTEHESRRCQKAVRDFFSLMGLFVVSDFLPFLERLDLQGYEKEMKRVAREVDGIVQGWLDEHKRKRESSETTHDQDFMDVMLSILKDSKFSNSDYDADTINKATCFNMILGGSDTTMSTMTWALSALLNNPHMLKKAQDELEFHVGKGRQVEESDIKKLTYLQAIIKETLRLYPSAPLLAPREATEDCKIAGYHVPAGTRLIVNVWKIHRDPFVWPNPNEFQPERFLNKDVDVKGQHFELIPFGSGRRACPGVSLGLQVVSLGLARLLHGFELSIPSGSKVDMTETASLVTFKATPLEVFITPRLSPHMYVE

SEQ ID NO: 175 - protein, 502 aa, Mahonia aquifolium
YAWKRKNHTKDSKIKEPPQPAGAWPIIGHLHLISRGGLPHINMGAMADKYGPVFMIRLGVNRAVIVSNSEIVKECFTTNDKFLLNRPVGLALNLMSYNNAMFGFSRYGPYWREIHKIVMLELLSSSRLESLKHVWDSEILTSIEELYQLCQTQNKAHEGPVLVEMKDWFADMALNVSFRMVAGKRYFGASAGGNKDEARRCQKTMRDFFRLVGLFIVSDALPFLRWLDLGGHQKEMKRTFEDLDYVLQGWLDEHKLNRKSGGNGDQDFMDVMLSTLYDSKFTDYDVDTINKATCFQLILGGTDTTTVTLTWALSLMLNHPHVLKKAQDELDIQVGKHRQVEESDIKNLKYLEAVIKETLRMRPVGPLLGPREAIEDCTIGGYRVRAGTRVMVNAWKVQRDPSVWPNPDDFKPERFLKKDIDFRDQNFEFIPFGSGRRACPGISFAVELLPMALARLLHGFELKTQLGCKVDMTEHAGLVHAKATPLEVLVSPRLSRELYVSS

SEQ ID NO: 176 - protein, 529 aa, Menispermum canadense
MDSTDHHLALVIPTLLATPVLLFSFYCLLLRPRSLKKPRTNKPPEPSGSWPIIGHLHLLSQGLPHITLGAMADKLGPAFSIRLGTRRALVVSSWEVAKECYTTNDRAFASRPSSIAVKLMSYNNSILGFAPYGQYWRELRKIVVLQLLSNRRLESLKNVWESEIDLSIKELYDTWASNRGGEALMVDMKQWFGDLTMNIVVRLVVEKRCFGRSVGDDETEARRGQRALKEFLKLVGLFLVEDAFPFLSWLDVQGHQREMKRIARELDSLFQGWLEEHKRKRSIKGEAKGDQDFMDVMLSVLEDSTISTDIEDDTVIKSTCLTVVLGGSDSTVGTLTWALSLLLNNRHELKKAQDELDAYVGKERQVDESDIKNLVYLQAIVKEVLRLYPAGPLSGPRESVEDTVVAGYHVPKGTQLIVNLWKIQREPSIWADPLEFQPERFLTTHKGMDVWGQHFELIPFGSGRRSCPGTAFALQVIHLTLARLLHGFELTTPCGAPVDMSESAGLINVKTTPVEVHVAPRLPLKLYKS

SEQ ID NO: 177 - protein, 529 aa, Menispermum canadense
MILIAMGNHIELQDIILYSLGFFAATILWRIFSTYVLRRNSCSRPPEAAGKLPLIGHLHLLGANKILHHTLGDMADRHGPIFSLNLGIKRTLVITSWEVAKECFTTQDRVFATRPKSLVGKVVGYNSTVMIFQQYGPYWREIRKLAMIELLSNRRLEMLKHVRESEVNLFIKELYEQWSSNENGSKVVVEMKERFGDLTTNIVVRTVAGKKYSGTGVHGNEESRRFQKAMTDFMHLAGLFMVSDALPLLGWIDTFKGYRGKMNKTAEEIDHVLGSWLKEHQQKRKNISINHLDEDFIHVMLSAMDGNQFPDIDTETAIKGTCLSLILGGYDTTSATLTWALSLIVNNHHVLKKAQDEMDKYVGRDRQVKESDVKNLTYLQAIVKETLRLYPAAPLSVQHEAMEDCTVAGCNIPAGTRLVVNLWKMHRDPKVWSDPLEFQPDRFLQKHVNVDIWGQNFELLPFGSGRRSCPGITFAIQVLHLTLAQLLHAFQLGTVFASPIDMTESSGVTNPKATPLQVTLTPRLPPEVY

SEQ ID NO: 178 - protein, 513 aa, Menispermum canadense
MDSTYQLLSALLFILCLYYLVCKPITKTKNDEAPVPAGAWPIMGHLHMLRGPNLPHITLSSMADKHGPAFTIRLGTRRALVVSNSDLAKECFTVNDKAFSTRPSTVATKLMGYNNTMFGFAPYGPYWRELRKIVMTELLSSRRLESLASVWASEIESSVKELFAEWAENRAKGPVVVEMGEWFGNLTLNIALRMVVGKRYLREESRKCLKAMRDYPELFGRFLVEDAVPFLGWLDLIQGYQREMKKTARELDSVLEKWLVEHKDKRGSGEGKGEHQDFMDVMISVLEDSKLSYGEADTVNKSTCLNLILGATDTTMVALTWALSLLLNNKQVLKRAQQELKSQIGNNKQVSQSDIKNLLYLQATVKEALRLYPPEPLSGPREALEDCTVAGYRVRAGTRLIVNLWKIHRDPSIWQVPLEFRPERFLTAHKDVDVWGQHFELMPFGSGRRSCPGISFVLQVVPLILARLLHGFELTTPGEALVDMSESAGLVNAKVTPLEVVISPRLPLELFAG

SEQ ID NO: 179 - protein, 534 aa, Menispermum canadense
MIMMFIDYYSSWLPQTLLLQSILLAVSLVIFINLFLTRRRSYSSKSHTNIIHPPKAAGALPVIGHLYTLFRGLSAGVPLYRQLDAMADRYGPAFIIHLGVYPTLVVTCRELAKECFTTNDQTFATRPSTCAGKYIGYNYAFFGFAPYGPYWREARKIATVELLSNYRLDSLRHVREAEVGRNVDELYALHASSSTNKQNMMKIDMKQWFDQVTLNVILMMVVGKRCVTTGGNEEEVRVVKVLHEFFKHLGTLSVSDVVPYVEWMDLDGNIGRMKSTAKELDCILGRWLEEHRRERRSDFMDAMLAMVEGIKIPYYDSDTVIKAICLNLLNAGSDTLGITMTWALSLLLNNRHVLKKVKDELDVHVGKNRQVEELDVKNLVYLHAVVKETLRLFPPAPLGVPHEAMEDCVVGGFHVAKGTRLVVNVWKLHRDPSVWSDPLAFKPERFLDNNTVDVRGQHFQLLPFGSGRRGCPGITFALQVAHLTLARLLHGFEWDTPDGAPVDMSEVSVLTTAKKNPVEVLFTPRLPAEVYTQN

SEQ ID NO: 180 - protein, 523 aa, Menispermum canadense
YQLLFLQTAIAGLLFALALLVRLRFSRRNNGKKKQAPPEPAGARLIMGHIHMLNSGEQPHKTLAALADQYGPVIKLRLGLRDAIVVSNWEMAKECFTTNDKIFLSRPQTVVSKFMSYNLKMLGFAPYGPYWREIRKIVVSELLSNRRLELLKNAWTSEISSWVKELFDEWGAKEARGPVVVDMRHWFGNLAFNIGMNMVAGKRFFGPRVVSDEDGLRRVQQGLTDFFRLIGAFLLEDAVPFLSWWDSQGYQKEMKDTAREMDTLIQGLLDEHKRRRSSSSGEAKGEKDFMDVMLNILEGSKFPSGDADNINKSTCLSLMLGLTDTTTATLTWALSLLLNDPRVLKKAREELDFHVGKNRLVDTSDLMNLPYIHAIVKEVLRLHPPAPLSGHRESLEDSVVGGYHVPKGTRFMVNVWKIHHDPNKWPDPIEFRPERFLTTHKDVEVWGQNFELIPFSSGRRVCPGASLSLQVLPFTLARVLQGFEVATPGGAPVDVTESKGLSTAKETPLDVVITPRLPEKFYH

SEQ ID NO: 181 - protein, 528 aa, Nandina domestica
MDSLISFQAIVGLFILILVSYQWLGRSRSIKTNKHNEAPEPAGRWPIIGHLHLLGGSDQLLYRTLGSMADKLGPAFNIRLGSRRAFVVNSWEVAKECFTINDKALASRPITVAAKLMGYNYAVFGFAPYSPFWRAMRKIATLELLSNRRLEMLKHVRISEVDMGLKEIYGLWSKNKDSGPLMIELNRWFENLTLNMVVRMVAGKRYFGADASCDENEAQRCQKAISEFFRLIGIFVVSDAIPSLWWLDLQGHEKAMKRTAKDLDSILGGWLEQHRSRRVNGKVPTEGEQDFIDVMLSLQEGDHLSDFEYDADIAIKSTCLALILGGSDTTAGTLTWAISLLLNHPYALKKAQEELDLHVGKDRQVYDQDIKNLVYLQAIIKETLRLYPAGPLLGPREAMEDCTISGFDVRAGTRLVVNVWKIQRDPNVWSNPSEFSPERFLTSHVDVDVRGQNFELMPFGSGRRSCPGASFALQVLHLTLARFLHGFGLANPLGKPVDMNESPGLTIPKATPLNVLLTPRLDSELYGC

SEQ ID NO: 182 - protein, 520 aa, Nandina domestica
METFQFLGIPLFGFFALLCTYYLVLRKPSSTKIREPPRPAGAWPIIGHLHLLARGDLPHVTLGKMADKYGPVFKLKLGVRQAIVVSDWEVAKECYTTNDRALANRPSGLGAKIMGYNYALIGSAPYGPYWRDLRKIITLEVLSSRRLESLKHVWDSEISTSVKELYQIWADQNKAQGQVSVEMKQWFSDMTLNVAVRLAVGKKYLGATADCEKNKAVQCQKAIRNFFRLAGLFVVADYLPFLGWLDLGGHEKEMKHTAKELDYIAQEWLDDHKKKRTSNRTVDEPQDFMDVMLSILEESTFTGYDVDIINKSTCFALILGGTDTVAVTLTWALCLLLNNPHVLKKAQDELDIHVGKDRHVNESDIKNLVYLQAMIKETLRLYPAGPLLGPRQVIEDCTIAGYHVRAGTRVIVNAWKFQRDPSIWSNPCEFQPERFLDKDIDVKGQHFELIPFGAGRRACPGISFALQVLPLALARLLHGFELKNPSESQVDMTETPGMVHAKTTPLEVLITPRLSPKFYV

SEQ ID NO: 183 - protein, 495 aa, Nandina domestica
WKRPTSVKYREAPQPAGAWPIIGHLHLLARGDLHHITLGAMADKYGPAFMMRLGVHQAMVVSDSESAKECSTTNDRVLATRPSSVAVKLMGYNYAMFGFGPYGSYWREIRKIVILEVLSNHRLESLKHVWKSEISMSTKELYQLWINQNKDEGPTLVELKQWLCNMTLNIGVRTVAGKRYFGASSCDANESNRIQRAIRDFFRFVGLFVVSDFLPFLGWLDLEGYQKEMKSIARELDSILQGWLDEHTRKRQSGGTNENQDFMDIMLSVLEHSNALTHYDADTINKATCFTMILGGSDTTMVTLTWALSLLLNNPHVLKKAQDEIDIQVGKDRLVDESDIKNLVYLQAIVKETLRLYPAVPIITPHEAIEDCTIAGYHVPAGTRLIVNAWKIQRDPLIWDNPGEFQPERFLYKDVDVKGKHFELIPFGSGRRVCPGISLALQVVSLAMAHLLHEFDLAKPSEGNVDMTESVGLVNAKATPLEVLITPRLSPKFYE

SEQ ID NO: 184 - protein, 525 aa, Nigella sativa
MGSFNQINPSVVYFAAFTIFFFFFLYKILYKRRTSAKTRVAPEPAGAWPFIGHLPLLSQQNLPHVTLGVLADKYGPAFTVQLGLHKAVVVSSWEVAKECFTVNDKVLATRPSSVAVKIMCYNYAVFGFGPYGSYWREARKIVVRELLSNHRLNLLKHVLVTEISMSMNELYTVWQKNANNVSGKALVEMKQWFGDLSLNMIVKIVAGKRYFQASANSDERDQLKRGVQDLFHLVGLFLVSDALPFLSWLDIGGHEKAMRRTAKELDNILGSWLDEHKQAKLAGATKGEQDFMDVLMSILEDNNNLPEYEPDVVSKAICLGMILGGADTTTITLTWIVSLLLNNQHILKKAQDEIDSKVGKDRQVNESDIEKLVYLQAIVKETLRLYPPAPLSTQHEAMEDCTIAGYHVQAGTRLITNIWKIQRDPGVWPNPCEFQPERFLTTHANVESNGKHFEFIPFGSGRRACPGMSLGLQVVHLTLARLLQGFELETPLSVEVDMTESAGLTNLKVTPLEVLINPRLPSNLY

SEQ ID NO: 185 - protein, 517 aa, Nigella sativa
MDLTSILICIFLFIISICFLSWKRSRSLSGTRAAPEPVGAWPVIGHLRLLMGSKTPHMTLGNLADNYGPAFTIRLGTKKTLVVSSWEVAKECLTTNDKAFAGRHSTMAVEIMGYNYAFFSLGPSGQYWREIRKITVSELLSNRRLELLKHIWSSEIKTSIKELYEICAAQSQYGKKQSPMVEMQQWFSHLNLNLSARMVVGKRYFADGVEENEGDIRRFQNAIKEFFYWAGAFIIADTIPYLRWMDFLNERSMKRTAKETDHVLEGWLQEHKRNRLNGVTKEQDFMDVLLTELGDKDLCGYTADVVNKATCLNMIFGGTDTTKTGMIWTLSLILNNPQVLKKLQNEIDIQVGKDRQVDDSDIGNLVYLQATVKEAMRLYPPATIFGRESIEDCTVAGYHIQAGTRLIVNAWKIQRDPNVWPNPDEFQPERFLTNQADVDFRGQDFELIPFGAGRRACPGISLTVRVTHLTLACLLQGFNFETPLNEPVDMSEKYGLTNSKATPLNVILTPRLPSNLY

SEQ ID NO: 186 - protein, 530 aa, Nigella sativa
MDSIFHMYAPINILAATFVFIVISVWFLLWMKRSRKNSKSRRAPEPVGGWPLIGHLRLLVGPELPHVILGSLADKYGPALSIRLGMRQALVVSNCEVVKECLTTNDRCFSTRPSSVAVELMGYNYASFGLGPYGGFWREVRKIAILELLSNHRLKSLKHVWISEISGFVKELYQLCVANGNTGRQSALVEMRQWLNDLTLNVSVRMVVGKRYFGSGSEHGGEDVKRFQKAIKDFFRLAGKFTLADAIPFLRWLDFGHERAMKKTAKELDYVLARWLDQHQKNKLNCETKQVDQDFMDVMLTVLGDKDLYGFKADVVNKATCLNLILGGVDTTSVTLTWALSLLLNNPNILNKAQEEIDVQIGKDRQVDDNDLGKLVYLEAIVKETMRLYPAGPLSGARAAIEDCMVAGYHVPKGTRLIVNTWKIQRDPEKWDNPSEFRPERFLITTTNGHVEVWGQHFEYIPFGSGRRICPAISFSLQLVHLTLARLLQAFSFQTPSNAAVDMTETPGLVNFKATPLQILLTPRLPSSLY

SEQ ID NO: 187 - protein, 527 aa, Nigella sativa
MLSIHDSTMVFLQLQAICGIFGFIFIITWWTRWKSSNKMKAPEVAGAWPVIGHLHLLGGGRPLYQLLGDMSDKYGPAFTLRMGIQKALVVSSWEVAKECLTTNDRALATRPSSAGGKYMGYNNALIPFSPYGPYWRDMRKIATLELLSNHRLEELKHVREMEINTCISDMYKLCQVEDGVEIKPISVDLSQWFADLTFNVVVMMITGKRYIGSTDAGDMNEIRHFQAALVKFMRLLRISLLVDVFPVLQWINYGGFKGVMKSTARDIDSVLENWLQEHQRKRLSPDFNGNHDFIDVMISTLEGTEFSDYDHNTIIKAISMAMVVGGTDTTTTTLIWAISLLLNNPNAMKKVQEELEIHVGKERNVDGSDIQHLVYLQAVVKETLRLYPPVPLSVMHQAMEDCVIGSYNIQAGTRVLFNLWKLHRDSSVWSDPLEFRPERFLTSHVDVDVRGQHFELIPFGSGRRSCPGISFALQVIHLTIARLFHGFNLTTPGNSSVDMSEISGATLSKVTPLEVLVTPRLSSKLYN

SEQ ID NO: 188 - protein, 520 aa, Nigella sativa
MDFLIYVAAFAAAFFFLLFYNILSKRITGTKRRIAPEPAGAWPFIGHLPMLFGPNLPHVTLGALADKYGPAFTIQLGLHKALVVSSWEVAKDCFTVNDKALATRPTSAAVKIMAYNCAVFSFSPYGSYWREARKIAILELLSHHRLDLLKHVRKSEVSTSIRELYQFWQKNATEVTKFAQLEMKQWFGDLTMNLIVRMVAGKRYASVQSDDDGEGKRLQKAVNDFFHLVGLFVVSDALPFLGWLDIGGNLKTMKKTARELDSIMECWLKHQARRSNGEQDFLDVMLSILREDNKLQEYDGDVVVKAMCLNMILGGADSTTITLTWTISLLLNNRHILQKAQDEIDSKVGKDRQVNESDIEKLVYLQAIVKETLRLYPPAPLSSQHEAIEDCTIAGYHIPAGTRLITNLWKIQHDPSVWHNPSEFQPERFLTTQANVDFRGQNFEFIPFGFGRRSCPGTSLGLQMVHLPLARLLQGFTFETPSNAAVDMTESAGLTNHKVTPLEVLISPRLRFDLYQESPP

SEQ ID NO: 189 - protein, 525 aa, Nigella sativa
SFNQTYTGFICLSVFASFFFFFLYSVQQKRRTGRKARYAPEPTGAWPLIGHLPILFEPNLPHIQLGALADKYGPVFSIKLGLRKALVVSSWEVVKECFTVKDKVLASRPSSVAVKIMGYDYAVYAFGPYGSYWREARKLTILELLSDHRLDLLKHVRVSEVSMSMKELLKFCQKNANNVSGKALLVDMKQWFGDLTLNVIVRMVAGKSYLGASAKLEDGEQKRLQNAIHEFFRLAGLFVVSDALPILSWLDIGGHEKAMRRNAREIDKIMSSWLDEHRRNKLAGVTNGEQDFMDVLLSKFENSNLPGYEPDVAIKAICLNMILGAADTTIVTLTWVVSLILNNRQILKKAREEIENKVGKDRQVNESDIEKLVYLQAIVKETLRLYPAAPLSAHHESMEDCTIAGYHVPAGTQLITNLWKIQRDPRVWPNPCEFLPERFLTTHANVNYKGQNFEFIPFGYGRRSCPGMSFGLQMVHLVLASLLQGFELETPLNEAVDMTESAGLTNLKATPLEVLITPRMPLNLY

SEQ ID NO: 190 - protein, 509 aa, Nigella sativa
VTVIYLFTFAIFFYLYSILWKNPRKSAKTRVAPEPAGAWPFMGHLPMLLEPNLPHIKLGALADKYGPAFTVQLGLHKALVVSSWEVAKECFTVNDKVLADRPSSVAVKIMGYDNAVFAFGPYGSYWREARKISTVELLSNHRLSLLQHFRISEASMSMKELYQLCANNGKALVEMKKWFGDLSLNVIVRMVAGKRYAKASEDDERRQLQKGLKDFFYLVGLFVVSDALPILSWLDIGGHEKAMRRTAKELDTIMERWLDEHRRAKLAGVTKGEQDFMDVLLSILEDGKLPHYESNTVNKAICLTMILGAAHTTTVTLIWTLSLLLNNRHILNKAQDEIDSEVGKDRAVTESDIKNLVYLQAIVKETLRLYPAAPLPAHREVMEDCIIAGYHVPVGTRIITNLWKIQRDPRVWSNPCAFQPERFLTTHSNVDFRGQNFEFIPFGSGRRSCPGISLGLQMVHLALARLLQGFELETPLNLGIDMTESSGLTNLKVTPLEVVITPRLPSNLY

SEQ ID NO: 191 - protein, 562 aa, Papaver bracteatum
MAYLMIKKSFHLFSDQPTSVSTLIVLAFLLTLSPVIIYYEQKKRGLRRNRTSSSCTAITTTPLPEASGAWPVIGHLLLFMNENDLNHATLGNMADKYGPIFSLRFGSHRTLVVSSWEMVKECFTGANDKFFSNRPSSLAVKLMFYDTESYGFAPYGKYWRELRKISTHKLLSNQQLDKFKHLRISEVDNSFKKLHDLCSNNKLGGETTSVANLVRMDDWFAYLTFNVIGRIVSGFQSNAVSGATSSQEKYKLAIDEVSNLMATFAVSDVVPCLGWIDRLTGLTGKMKKCGKKLDAVVGDAVEVHRQKKLKISRNTAGELTEHEEEDFIDVCLSIMEQSQIPGNNPEISVKSIALDMLSGGSDTTKLIMTWTLSLLLNHPDILDKAKEEVDTYFRKKKISDNTPVVDAADVPNLVYIQAIIKESMRLYPASTLMERMTSDDCEVGGFHVPAGTRLWVNVWKMQRDPRVWNDPLVFRPERFLSNDKGMVDVKGQNYELIPFGTGRRICPGASFALEVLHLVLTRLILEFEMKAPEGEIDMRARPGFFNNKVVPLDVLLTPRTLD

SEQ ID NO: 192 - protein, 519 aa, Papaver bracteatum
MNNYSSSPASSTETAVLCHQRQQSCALPISGLLHIFMNKNGLIHVTLGNMADKYGPIFSFPTGSHRILVVSSWEMVKECFTGNNDTFFSNRPIPLAFKIIFYAGGVDSYGLALVPYGKYWRELRKICVHNLLSNQQLLKFRHLIISQVDTSFNKLYELCKNSEDNQGMVRMDDWLAQLSFSVIGRIVCGFQSDPKTGAPSRVEQFKEAINEASYFMSTSPVSDNVPMLGWIDQLTGLTRNMTHCGKKLDLVVESIINDHRQKRRFSRTKGGDEKDDEQDDFIDICLSIMEQPQLPGNNNPPKIPIKSIVLDMIGGGTDTTKLTTIWTLSLLLNNPHVLDKAKQEVDAHFLTKRRSTNDAAVVDFDDIRNLVYIQAIIKESMRLYPASPVVERLSGEDCVVGGFHVPAGTRLWVNVWKMQRDPNVWADPMVFRPERFLSDEQKMVDVRGQNYELLPFGAGRRICPGVSFSLDLMQLVLTRLILEFEMKSPGGEVDMTATPGLMSYKVLPLDVLLTHLSAS

SEQ ID NO: 193 - protein, 540 aa, Papaver bracteatum
MEFLMKLLLLLEPITFSIFLGIGSIVLLYNVFFLVINKKKKKKAPNASGAWPLIGHLNLFMNDKEALYKTLGTMADKYGPAFNVRLGNQEILVVSNWKMVKECFNTQNDKLFSNRRTTLGVKYMLNKKTSVAFSPYGTYWRELRKLTVQQLLSKQRLDSWKHLKIKEIDASFGRLNDLCSNNKGTGAATPIRMDSWFAELTFNVFARIVFGYQSGERLMLSGDTASNGERYKKTLEEAFLLMSSFAVSDVFPCLEWVDRSRGLVRSMKRFGDQLNSIAGCLIEEHRQKRSQSVSASNSTNDKGVGDEQDFIDVLLSVAELSQIPGDDPDLVIKSMILEALAGGSDTTTSTLTWVLSLLLNHPKVLKTAKEEIDMHVGRNRCVEESDIPKLVYVNAIIKESMRLYPNGSLVDRLTLEECEVGGFHVPAEGHLFVNVWKIHRDPSVWENPLEFKPERFLSNDCKVDMDFISQKYEFIPFGIGRRICPGMLSALQVMHFVVARLIHGFDMEAASADGKVDMAEKPGMTCYKMTPLEVMLTARQ

SEQ ID NO: 194 - protein, 548 aa, Papaver bracteatum
MYPVNQLQSQAIAVLCAVIVFIFYLGRKLFNSTHIHKPGKTAPEPAGAWPIIGHLHLLGGAKLMYRTLGSLADEYGPVFMVRLGMRRVLVISNTASARECFTTNDKVFATRPTTVAIKLLTYNHTMFGFAPYGPYWREIRKIATTELLSDRRLAMLKNVWISEINLCINELHQLLMDKNSRKVDHHQHVYNQNMDPISVEMNGWFADLSFNVVARMIAGKRYFGKNTDGGEEETRRYREAMNDFMHLVVILLVSDAVPFLGGLDFQGYKKRMKKTAKEIDYFLGKWVDEHRQRLKYKNISKVDQQDDFIDVLLLNLNDQPIYGRDTDTIIKSTCLSLIAGGSDTTAVTLTWALSLLLNNQHVLRKAQDELDIHVGRERQLEESDIKNLVYLQAIVKETLRLYPAAPLSAPRMAMEDCTVAGFQVSKGTQLMLNVWKLHRDPHFWGPDPLEFRPERFLTADGSSTGSGHCIDIDVKGRHYELLPFGSGRRMCPGVSFAMQVVHLTLATLLHGFHLSTPTDGPVDMTETSGLSCPKATPLEVLLTPRLPC

SEQ ID NO: 195 - protein, 567 aa, Papaver bracteatum
MDVAIIVDHHYLQPFVSIAGLLALLSFFYCIWVFIIRPRIIKSNLDERKLSPSSPPEVAGAWPIVGHLPQLIGSTPLFKILADMSNKYGPIFMVRFGMYPTLVVSSWEMSKECFTTNDRLFATRPPSAAGKYLTKALFAFSVYGPYWREIRKISTIHLLSLRRLELLKHGRYLEIDKCMKRLFEYWMEHHKNIISTTSSVKVNMSQVFAELSLNVVLKIIVGKTLFIKNGNEDYTKEEEEGQKLHKTILKFMELAGVSVASDVLPFLGWLDVDGQKKQMKRVYKEMNLIASKWLGEHRERKRLQIIQKRGAARGSNYDDGNDFMDVLMSILDEENDDLFFGYSRDTVIKSTCLQLIVAASDTTSLAMTWALSLLLTNPNVLQKAQDELDTKVGRDRIIEEHDIECLVYLQAIVKETLRLYPPAPLSLPHEAMEDCTVGGYQVKAGTRLVVNLWKLQRDPRVWSNPLEFKPERFLPQSDGGFGGEEARMDFRGQHFEYTPFGSGRRICPGIDFFLQTVHMALARLLQAFDFNTAGGLVIDMVEGPGLTMPKVTPLEVHLNPRLPVTLY

SEQ ID NO: 196 - protein, 558 aa, Papaver bracteatum
MQVDWPNILQKYYPIITCSLLTLLSFYYIWVSITKPSRNSKTKLPPPEVAGSWPIVGHLPQLVGSTPLFKILANMSDKYGPIFMVRFGMHPTLVVSSWEMSKECFTTNDKFLASRPPSASAKYLGYDNAMFVFSDYGPYWREIRKISTLQLLTHKRLDSLKNIPYLEINSCVKTLYTRWAKTQSQIKQNVGGAADDFVKVDMTEMFGHLNLNVVLRLVVGKPIFIQKDNADEDYTKDGHNKEELGQKLHKTIIEFFELAGASVASDVLPYLGWLDVDGQKKRMKKIAMEMDLFAQKWLEEHRQKGINHDNENDFMAVLISVLGEGKDDHIFGYSRDTVIKATCLTLIVAATDTTLVSLTWALSLLLTNPRVLSKAQDELDTVVGKERNVEDRDVNHLVYLQAVIKETLRLYPPSPLAVPHEAIENCNVGGYEVKARTRLLVNLWKIHRDPRVWSNPLEFKPERFLPKLDGGTGEASKLDFKGQDFVYTPFGSGRRMCPGINFASQTLHMTLARLLHAFDFDIESNGLVIDMTEGSGLTMPKVTPLQVHLRPRLPATLY

SEQ ID NO: 197 - protein, 571 aa, Papaver bracteatum
MMDLAMFIDQYFSLAKIAGLLALLSFFYYLWISTLWSPRNPKLSSVSPPEVAGAWPILGHLPQLLGSRPLFKILADMSDNYGPIFMVRFGMHPTLVVSSWEMAKECFTTNDRFLAGRPSGAANKYLTFALFGFSTYGPYWREIRKIATLHLLSHRRLELLKHVPDLEVTNCMKHLHRRWIDSQNQIKQNDAAAGSVKVDMGRVFGELTLNVVLKLVAGKSIFFKNDNTRQYDSKDGHNKEEEEGKKLHKTIIDFYSLAGASVASDVLPFLGWLDVDGQKKRMKRVAKDMDFIAAKWLEEHRHQKRQTVLSSSATLGSSNHDDAKDFMDVLMSILDGENDDLFFGYSRDTVIKTTCLQLIAAAADTTSVTMTWALALLITNPTILRKAQDELDTKVGKDRNIEERDINDLVYLQAIVKETLRMYPAGPLNVPHEAIADCNIGGYEVRAGTRLLVNLWKMHRDPRVWSNPSEFKPERFLPQLDGGSGGEAANLDFRGQDFEYLPFSAGRRMCPGIDFSLQTLHMTLARLLHGFDFNNDSAGIIIDMEEGSGLTMPKLTPLEIYLCPRLPAKLY

SEQ ID NO: 198 - protein, 543 aa, Sanguinaria canadensis
MEFLSLQFQPITIFALLLATPIFLYNLWNYGRKLNNKNKKSRKPPAPEASGGWPIMGHFHLFNGTEVTHRALGSMADKYGPAFNIRIGSHPTLVVSSWEIAKECFTTNDRLFSNRPGSLAIKLMFYDADSVGYAPYGTYWRELRKISTLKLLSNHRLETLKHLRTSEVESCFKQLHDLWRMNNKKGGSDDGSDFALVRIDNWFGDLTFNVVARIVAGKKNFAGGAASGDAGAQRYKEAMDEAFRLMTRFAFSDVVPSLGWLDKLTGLVGGMKRCGSEIDSIVASWVDEHRLKRISGKEGDDLEQDFIDVCLEILEHSTLPGDDPEVVIKSTCLDMILGGSDTTTVTLTWALSLLLDHPHVWKRAKEEVDAHVGKERQVEDSDIPNLVFIQAIVKETMRLYPAGPLIERRTMDDCEVGGFHIPGGTRLIVNLWKIQRDGSVYKEDPLEFRPERFLTSNAEVDLKGQNYELIPFGAGRRICPGVSFAVQLMHLVLARLIHDFEITMPMGAKVDMTESGGLISHKVTPLEVLLKPRLPSLQQAALY

SEQ ID NO: 199 - protein, 525 aa, Sanguinaria canadensis
MEYSSVLLHWFPASMAALLALVFLYNLIFNSPKTGNKKIIRRAPKAAGAWPVLGHLHLFGSGELPHKMLAAMAEKYGPAFTMKFGKHTTLVVSDTRVVKECFTTNDTLFANRPSTKAFDLMTYANDSVAFTPYSPYWRELRKISTLKLLSNHRLQSIKEVRVSEVSVCFRELYDICKNDGGGAPPVLVDMKKWFEEVSNNIVMRVIVGKQNFGSKIVCGEEEAVNYKNVMDELLRLASVSMLSDVAPLLGWLDMFQGHMSAMRRNGKKLDTILERWLEEHRKKKSEDEQDFMDVMLSIVEETKLSGRDADTVIKATCLAMIMGGTDTTAVSLTWIVSLLMNNRYALKKAREELDALVGKDRQVEDSDLKNLVYLNAVVKETMRLYPLGTLLERDTKEDCEVGGFHVEGGTRLLVNVWKLQRDPNVWNDPLEFRPERFLTENADIDVGGQHFELLPFGAGRRVCPGVSFALQFMHLVLARLIHGYELGTQNDEDVDLTESTEGHVNHKASPLDLLITPRLHPKLYE

SEQ ID NO: 200 - protein, 527 aa, Sanguinaria canadensis
MDYSSHLNQFYGVAPYMAALLIALVFLYNILWASPKTTNKKPIMAAGAWPILGHLHLFKDGELPHHMLKSMSDKYGPAFLMKFGQHRTLVVSNYRMVKECFTTNDTHFCNRPSTTAFDVMTYANDSVAFTAYSPYWRELRKISTLKLLSNNRLQAIKNLREAEVNVSFRGLYDLWKNNSDRAASVLVDMKKWFEEVSNNVVIRVIVGKHNFGTKIVKGEKEAVEYKTIMDELLRLASLSLLSDFAPILGWVDFFQGNVRKMKRNGKKLDVVLQRWLETHRRKKNSPEDEQDFMDVMLSIVEEGDKLSGHHADTVIKATCLAMIMGGTDTSAVSLTWIVSLLMNNRHALKKAREELDMYVGKDRQVEDSDLKDLVYLHAIVKETMRLYPLGTLLERETKEDCKVGGFHVEAGTRLLVNIWMVQRDPTVWSDPTKFIPERFLTEKADIDVGGQHFELIPFGAGRRVCPAVSFALQFLHLILARLIHGYELGTPNDADVDLTESPEGHVNHKASPLELLLTPRLDPKLYI

SEQ ID NO: 201 - protein, 535 aa, Sanguinaria canadensis
MNSIAVVGVLLFFLYYLWRTLFTTHKAAPPPQPAGARPIIGHLHLLGGANQLVHQTLGSMADKYGSIFMIRLGMRRVLVVSSSELAKECFTTNDKVFLNRPSSLALKLMAYNNAIFGFAPFGPYWRKMRKIAVTELLSNRRLEILKNIRISEINMSIKELHQLWVDMNSGDDQVGGPPIVVEMRKWFGDLSFNVVGRMIAGKRYFGRNCDCDEEETRRYQKAMGDFMHLVGVFVVSDAIPLLGFLDLQGYEKKMKRTAMDIDCVLGRWVDEHRRRRQDHDEKRIMVSDDDHQGQDFIDVMLSILNDDDQFYGYDADTVIKSTCLSLIAGGHETTAVTLTWALSLLLNNRHVLQNAQDELDIHISKERQVDESDIKNLKYLQAIVKEALRLYPALPLSALRLAMEDCTIAGFHVPKGTELMLNLWKLHRDPHVWSDPLEFKPERFLTNSTHEEVDVGGQHYELLPFGSGRRMCPGVSFALQVLHLTLARLLHGFHLSTPSGVPVDMTQSFGLSCPKATPLDVLLTPRLPSKLYYVA

SEQ ID NO: 202 - protein, 601 aa, Sanguinaria canadensis
MISTTPDVLATSSYSSSNKHMDSDHLYRFSTSTSIVIGLFILLFFLVLLWKPKKQSATSKTNKPTREQRAPEPSSSWPIIGHLRLFGGPNSLPHITLGAMADKYGPVFTIRMGSRPVLVVSSWETAKECFTTNDRVFASRPRTIAIKHMCYEHVMLGFAPYGSYWRELRKIVNRELLSNNRLELLKHVWGSEINTSIKELYELWLVNKNNIEAEGENEGTSDRVLVEMERWFADLTLNMSIKIVVGKRYPSGVTAGGSSGCDDDEAQRCRKALRDFFKLVGLFLVSDAIPFLRWLDLGGYEREMKTTARELDCLMEEWLEEHKMKRRLLISPSAGDHHEAAEIMINKQKEAELQEYDFMDVMLSILDDDIEGKNLSDYDVNADTINKSTCLNLILGGSDTTMVTLTWALALLLNNPHVLQKAQDELDIHVGSKRQVDDSDMKNLIYLQAIVKETMRLYPAGPLSVPHESTEDCTVAGYHVPAGTRLIVNTWKIQRDPRVWSNPSEFKPERFLTDSHVDIDVRGRNFELIPFGSGRRSCPGTSFALQVVHLVLARLIHGFEFKTPSEAPIDMTESVGLSNFKATPLDVLLTPRLPSQLYYVS

SEQ ID NO: 203 - protein, 525 aa, Sanguinaria canadensis
MDSTLVFIGLFALLLVYPLLLRRSVLKSTSNTNKTTYKSKNQAPEAAGAWPIIGNLHQLAGGGNCLHKTLGAMADKHGPAFTIRMGLHKALVVSSWELAKECFTTNDVVFMSRPHQVAIKHMGYSTAMFGIAPYGPYYREMRKIVTQELLSNRRLELLKHVWASEINNSIKQLYEKVEGGPVLIEMKRWFADLTLRTTVKVICGQQQFGGDDDDDEAGRFQTALRDFFRLLGHFRVADVIPVLEWLDFQGYKKEMENNGRVLDNLMNKWLEEHKRKRKNGGTEEDFMNVMISKLLDDTKMLSYYDADTINKSTCLTLILGGSDTTMVSLTWALSLLVNHPHVLKKAQEELDVHVGKERQVDDSDLWSLTYLQAIIKETLRLYPPGPLSAPRESTDNCTIAGYHVPAGTRLIVNTWKIQRDPRVWPDPLEFKPERFLTTHVDVDVKGQNFELLPFGSGRRACPGASFALRVLRLSLARLIHGFDFKTPLDDSPIDMVESGGITNVKDTPLEVLVTPRLPSSLYVCK

SEQ ID NO: 204 - protein, 532 aa, Sanguinaria canadensis
MDFDLYQFSKPTIFIGGLFAILLYFVLKKSSTPKSKSKLEQPPEPAGAWPIIGHLPLLGGPDLPHITLGKLADKYGPAFTIRIGVHKAVVINSWEVAKECFTTNDKAFSSRPRQVAMKHMGYDYAMFGFAPYGNYWRELRKIVNREVLSHSRIESLYHVWGTEINTSVKELYELWGKKSTGSGGAPVLVEMKRWFSDMTLNMSVMMVAGKRYNFSGNKADDEAGRCQDGLRNFFRLVGLFVPSDALPFLAWLDIGGYEKEMKKVAKELDVLVQEWLEEHKEKRLALTAAGKKGSENDFMDVMMNILEDQKLSEFDADTINKATCLTLILGGTDTNMVNLVWALTLLVNNQDALKKAHDELDFHVGKDRQVEESDVKNLVYIQAIMKETLRLYSGPLSGLRESTEDCTVAGYYVPAGTRLIINAAKIHRDPRVWSDPTAFKPDRFLTEQKEMDVRGQDFEILPFGAGRRICPGVSFALQVLPLALARLIHGFDFKTPTDAPIDMTESPGLTNAKSTPLEVLVSPRLTSKLYGC

SEQ ID NO: 205 - protein, 555 aa, Sanguinaria canadensis
MDSILNQFISKPTMVICSLFALLSLYFLLIKRSTTKSKLQLPPEPAGAWPVIGHLHQLGGPNLPHITLAAMADKYGPIFTMKIGTYRALVVSSPEVAKEIFTTHDRIWATRPNQAAMKHLGYDSAMFGFAPYGPYWRELRKLVNRELLSNTRLDLLHHVWDSEINTSIKELYDSLATKNNAKGRGTGGAGSTGPVLVEMKRWFADLTLNITVRMVAGKRYFGANKTSSTSTDQCDNEKGDSKAWKCQRELRNFFRLVGLFVVSDALPFLGWLDLGGHEREMKNTARELDVLVQGWLDEHKRKRSLSVAEGGEKINGEQDFMDMMLSTIDDAKLSGYFDADTINKSTCLNLILGGSDTMMVNLIWPLTLLVNYPDELKKVYDELDTHVGRDRQVDESDIKNLVHLKAVIKETMRLYTGRITGLRQSSEDCTVAGYHVPAGTRLIVNTWKISRDPRYWSDPLEFKPERFLTTHADIELTGQNFELIPFGSGRRSCPGASFAIQLLHLALARLVHGFWFERPSDAPIDTSECPGLTNFKATPLEVLATPRLPSKLYVG

SEQ ID NO: 206 - protein, 538 aa, Sanguinaria canadensis
MDFILNQFISKPTMVLGTLFALLSLYFLLIKRSTTKSKLQLPPEPAGALPIIGHLHLLGGPNPPHITLANMAEKYGPIFSIKMGLKRALIVSSSEVTKECFTTHDLNFVSRPRHAAMKLMGYNFATFGFAPYGPYWRELRMIINRELLSQTRILSLEHVWGSEINESIKELYDLLTRKGGGGGGPVVVEMKRWFADLTLNIAVKMVCGKRYFGVNSPSTSTTRDVQEDDEARRCQKGMRNFFRLLGQFVVSDSIPFLGWLDLGGYQREMKNTARELDDLMQGWLEEHKKKRLERKTAAGEQDFMDVMLNILEDGKLSQYFDTDTINKSTCLSLILGGSDTTMVNLVWAFSLLVKHQDALKKTRDELDIHVGRERQVEESDIKNLVFLQAVVKETFRLYAGPISGVREAAEDCTIAGYHVPAGTRLLINSWKIHRDPRVWSDPLEFHPERYLEARHADIDVKGQNFELAPFGMGRRVCPGSAFGLQVLHLTLARLIHGFEFKTPSDAPVDMTESVGMSIIKATPLEVLVTPRLPSELYV

SEQ ID NO: 207 - protein, 533 aa, Sanguinaria canadensis
MDISNLYELYYFSTPTLFVGGLFVLLLIYSLFSSRPGIKSKLQQPPEPAGAWPLIGHLPVLSGPELPHVALGKLADKYGPVFTIRMGVHKSLVVSDWEVIKECFTTHDKVFSSRPCQVAMKLMGTAMFGFSPYGNYWRELRKIMNREVLSHGRIESLYHVWGSEINTSVKELYDLWAKKNNGGGPILVEMKRWFSDLTLNMSVMMAAGKRYNFGDDSSTTNDEAARCQHALREFFRLVGLFVPSDALPYLGWLDIGGYQKQMKKVARELDDLMQVWLDEHKKKRLAAKAEGKKGGEQDFMDVMMTILEDGKLSDYYDADTINKATCLTLILGGTDTNMLSLVWTLALLMNNRQALKKVHEELDIHVGRERQVEESDIKNLVYLQAVIKEEMRLYSGPLSGLRETTEDCTIAGYHIPAGTRLIINASKLHRDPKVWSDPLEFKPERFLTENVGVDVRGQNLELQPFGAGRRICPGVSFALQVLPLTLARLIHGFELNTPGDAPIDMTESPGLQNAKLTPLEVLITPRLPSKLYV

SEQ ID NO: 208 - protein, 535 aa, Sanguinaria canadensis
MIVIGAFLALVVLVVYYNLLLRRPALLKFKNMKQQAPEAASAWPIIGHLHNLAGGIGGNGLLHEKLGAMADKHGPAFIIRLGLHKALVVSSWEVVKECFTTNDVALISRPHQVASKHMGYGMAMFAFASPYGPYWRELRKIVKQELLSNSRLELLKHVWASEINTSIKQLYEKVKEGGGLPVLVEMKGWFADLTLKMTVKVICGKRHFRVAGNVGDHVDADDDDEVIGGRFEKALRDFFRLLGDIRVVDVLPFLRWLDFGVGYKKEMENNGRVLDILMEEWLQEHKRKRMNGGTEEDFMNVMISKLLNDTKLLSYYDADTINKSTCLTLILGASDTTMVTLTWALSLLVNHPQVLKRAQDELDVHVGRERQVEDSDIQNLTYLQAIIKETLRICPPGPIQAPHEAKDDCTVAGYHVPAGTRLIVNTWKIQRDPRVWPNPSEFKPERFLTTHVGVDVRGHNFELIPFGSGRRSCPGTSFALQVVHLTLARFIHGFEFKTPSDAPIDMTESGRITNVKATPLEVLVTPRIPPSGLYV

SEQ ID NO: 209 - protein, 572 aa, Sanguinaria canadensis
MDLLIFSSQLQGTVGLLALLTFSYYVWILIIKRIKTTNTLKVMNKVAAAAAPEVAGAWPIVGHLPQLVGPQQLYRILGDMADEYGPIFMVRFGMYPTLVVSSWEMIKECFTTNDRFLASRPSSAAGKYLTYDFAMFGFSFYGPYWREIRKISTLELLSHRRLELFKNVPFTEIDTCIKRLYQLWRVKNNDHPAAAPVIKVDMSQLLRDLTLNTILKLVVGKNLFNEKDHGEQEEGRKLHLHKTIVEFFKLAGVSVASDALPFLGWLDLDGQKKKMKRIAKEIDLIAERWLQEHQEKKSLSNKKLLAAGGGKVDGHDDFMDVLLFILDDDSQFFNFSRDTVIKATSWAMILTAADTTSVSMTWALTLLLTNPRVLRKAQDELDMKVGRDRHVEERDIENLIYLQAIVKETLRLYPAAPLGVPHEAIQDCTVAGYQVRAGTRVLVNLWKLHRDPRVWSNPSEFRPERFLIDDIDEQGGGGGGGGGESTAKDFRGQHFEYIPFGSGRRMCPGINFALQIVHMTLARLLHAFELRTTTSASLMDMTEESGLTMPKKTPLVVLLQPRLPLPLYDHHE

SEQ ID NO: 210 - protein, 533 aa, Stylophorum diphyllum
MEFLSLQHQLISIFALLLASIFLYNLLKNHGRKSKTSKPPAPEASGGWPIMGHLNLFNGSELTHQALGSMADKYGPAFNIRFGSHQTLVVSSSEIVKECFTTNDRFFSNRPGSLAIKLMFYNADSVGYAPYGAYWRDLRKISTLKLLSNHRLETLKHLRTSEVESCFKQLYNQWKNNKVGGDHDFALVRMDNWFGDLTFNVVARIVAGKKNFAGGATNGDVGAQRYKEAMDEAFRLMTIFAFSDVVPSLGWLDKLRGLVGGMKRCGAEIDSIVAGWVDEHRLKRASGKGGGHTDLEQDFIDVCLEIMEHSTLPGDDPEIVIKSTCLDMILGGSDTTTVTLTWALSLLLNNPHVLKRAREELDTHVGKDRQVDDSDMSNLVYIQAIIKETMRLYPAGPLIERRTSEDCEVGGFHVPAGTRLLVNLWKMQRDGSVYKEDPLEFRPERFLTSNADVDLKGQNYELIPFGAGRRICPGVSFAVQLMHLVLARLVHGFEMKTAGDAKVDMTESAGLISHKVTPLEVLLKPCLAIQQAL

SEQ ID NO: 211 - protein, 533 aa, Stylophorum diphyllum
MDSFLLIQWFAASMAALLAFVFLYNLVWSSSRTTKGKNIRKAPMAAGAWPILGHLHLFGSGELPHKMLSTMAEKYGPAFTMKFGKHTTLVVSDTRIVKECFTTHDTLFANRPSTTAFDLMTYANDSVAFTPYGPYWRELRKISTLKLLSNHRLQSIKEIRVSEVNVCFRELYESCKSKTDATPVLVDMKKWFEEVSNNIVMRVIVGRQNFGSKIVQGEDEAVNYKKVMDELLRLASLSMLSDVAPVLGWLDMFQGNKSAMKRNAKKVDTILEGWLEEHRMKKSASGISSAGENDQDFMDVMLSIIEETKLSGRDADTVIKATCLAMIMGGTDTTAVSLTWIVSLLMNHRHVLKKAREELDALVGKDRQVEDSDLKNLVYMNAIVKETMRMYPLGAMLERETKEDCEVGGFQVQGGTRLLVNVWKLQRDPNVWTDPTEFKPERFLNENADIDVGGQHFELLPFGAGRRACPGVSFALQFMHLVLARLIHGYELGTQNDADVDLTESTEGHVNHKASPLDLLLTPRLNNPNLYDY

SEQ ID NO: 212 - protein, 568 aa, Stylophorum diphyllum
MTIGALALLSFIYFLRVSVIKRTKYTNTAVTATNKLENDEDEANHSKRVVAPPEVAGAWPILGHLPQLVGLKQPLFRVLGDMADKYGPIFIVRFGMYPTLVVSSWEMAKECFTTNDRVLASRPASASGKYLTYNYAMFGFTNGPYWREIRKISMLELLSHRRVELLKHVPSTEIDSSIKQLYHLWVENQNQNKQGDHQVKVDMSQLLRDLTLNIVLKLVVGKRLFNNNDMDHEQDEAARKLQKTMVELIKVAGASVASDALPFLGWLDVDGLKRTMKRIAKEIDVIAERWLQEHRQKKLTSNDKGGSNNIQGGGGDNDFMDVMLSILDDDSNFFINYNRDTVIKATSLTMILAGSDTTTLSLTWALTLLATNPGALRKAQDELDTKVGRDRQVDERDIKNLVYLQAIVKETLRMYPAAPLAIPHEATQDCIVGGYHVTAGTRVWVNLWKLQRDPHAWPNPSEFRPERFLAVENDCKQQGTCDGEAANMDFRGQHFEYMPFGSGRRMCPGINFAIQIIHMTLARLLHSFELRVPEEEVIDMAEDSGLTISKVTPLELLLTPRLPLPLYI

SEQ ID NO: 213 - protein, 527 aa, Stylophorum diphyllum
MAALLPLAFLYNIFLASSSKATSKRTISTKKPPMVAGAWPILGHLHLFKEGELPHQMLKSMADKYGPAFLMKFGQHQSLVVSDYRIVKECFTTNDTLFCNRPSTTAFDVMTYANESVAFTEYSPYWRELRKISTLKLLSNNRLQAIKNLREEEVDVSFKGLYDSWKNKNNKSTAGSVGDERAPVLVDMKKWFEEVSNNVVIRVIVGKCNFGTKIVQGEKEGVEYKTIMDELLRLASLSLLSDFAPILGLLDFFQGHVRTMKRNGKKLDVLLQRWLEEHKRKKSTPEDEQDFMDVMLSIIEESKLSGYDADTVIKATCLAMIMGGTDTSAVSLTWIVSLLMNNRQALKKAREELDAQVGKDRQVEDSDLKNLVYLNAIVKETMRLYPLGTLLERETKEDCEVGGFHLEGGTRLLVNVWMVQRDPDVWTDPTKFIPERFLTEKADIDVGGGNFELIPFGAGRRVCPGVSFALQFLNLVLARLIHGYELGTPEDADVDLTESPEGHVNHKASPLELLLTPRLSNPKLYDY

SEQ ID NO: 214 - protein, 547 aa, Stylophorum diphyllum
MDSDHQLLSYQFSASNMFISLFAFVLYYLLVWRPTKSNLKMKTISSEDKQAPELAGSWPVIGHLHLLHGPNPLHVALGAMADKYGPAFTVRVGVHRTLVVSSWEVAKECFTTNDKVFVSRPRQAAGKHMGYNNAMLRFASDTPYWTQIRKMLKRDLLSNNRIELLNHAWHSEINTSIKELYEMNWSSGEGRRGGIRPPVSVDMKQWLGDLTLNMSVKMIAGKRCFGSGVSACDEGEARRCQKGLKDFVRLMGQIVVSDAIPFLGWLDLDGYEGEMKRAGKELDRLLGGWLEEHKMKRSPGDEASAQKDWMDLMLSVLGDGKLDGYYDADTINKATCLALLQGGSIWTMLTLLWAFALLVNHPHVMKKAHDELDNHVGRERQVEESDIKNLTYLQAIVKEAMRLYSVSMRLLESTADCTVSGYDVPAGTRLIVNTWKIQRDPRVWSDPSEFHPERFLTHRHRDMDLYGQNFEITPFGSGRRSCPGSSLGLQMVQLTIARLLHGFEFKTPSDAPIDMTESVGVENMVKATPIEVLLTPRLLDEVYAFYN

SEQ ID NO: 215 - protein, 561 aa, Stylophorum diphyllum
FCQFQGIVGILLAFLTFLYYLWRASITGLRTKPKHNDFKVTKAAPEADGAWPIVGHFAQFIGPRPLFRILGDMADKYGSIFMVRFGMYPTLVVSSWEMAKECFTTNDRFLASRPASAAGKYLTYDFAMLSFSFYGPYWREIRKISMLELLSHRRVELLKHVPSTEIDSSIKQLYHLWVENQNQNKQGDHQVKVDMSQLLRDLTLNIVLKLVVGKRLFNNNDMDHEQDEAARKLQKTMVELIKVAGASVASDALPFLGWLDVDGLKRTMKRIAKEIDVIAERWLQEHRQKKLTSNDKGGSNNIQGGGGDNDFMDVMLSILDDDSNFFINYNRDTVIKATSLTMILAGSDTTTLSLTWALTLLATYPLCALRKAQDELDTKVGRDRQVDERDIKNLVYLQAIVKETLRMYPAAPLAIPHEATQDCIVGGYHVTAGTRVWVNLWKLQRDPHAWPNPSEFRPERFLAVENDCKQQGTCDGEAANMDFRGQHFEYMPFGSGRRMCPGINFAIQIIHMTLARLLHSFELRVPEEEVIDMAEDSGLTISKVTPLELLLTPRLPLPLYI

SEQ ID NO: 216 - protein, 522 aa, Tinospora cordifolia
MDLPQPTISTTLLAFFSILLFIICYRLLSTKSDKRSSSSRNKPLDAPGAWPVIGHLHLLNGVIQHEILGTMADKYGPAFTIWLGTRPALVVSNWEVAKECFTTCDKALASRPPSLALKIMGYNDALFAFAPYGQYWRELRKIVMIELLSSRQLDSLKHVWDSEIDSCIEDLYEKCKGHRETVLVNMKQWFADLMMNVVVRMVVGKLNFGKTKEGDDEVAKAHQGQLKAMREFFKWVDVFMIEDAFPILTWLDPQGYQRKMKNIAKDLDSLVQGWLDEHKLKQKTGDNGKKDFMDIMLSAVKDASISDRDDETICKATCLNIILGASDTTTVTLTWTLSLLLNNRHVLRKAQEELQAQVGKHRCVEESDVKNLVYLHAIIKEVLRLYPAVPLLGPRESVADTVVAGYHIPAGTRLIVNLWKIHRDPLNWPDPLEFRPERFLTTHKDTDVWGQNFELTPFGSGRRICPGISFALQVIPLTLARLLHGFELTTPGSAPVDMTESTGLTNLKATPLDVFISPRLVL

SEQ ID NO: 217 - protein, 526 aa, Tinospora cordifolia
MESIPTAINVLLAFVSIYYLLKFRKKIITTTRDIKKIKAPELKGAWPIIGHLHLFRSDDLLHRKLGAMADELGPAFMIRLGMRPALVVSNWQTAKECFTTKDRIFATRPDSVAAKHMGYENLILGFTRYGPYWREVRKIVTLELLSSHRLHLLRHVRISEIDMSIKKLHQLCTSNDNKYSSVVVDLNQWFKALTLNIIVRIIAGKRYYGGDLEDDEESRRWKKALNEFMHLFGIFSVSDAIPQLQGMDVQGHERVMKRTGKDIDVILSKWLEEHRRKKIRVNREGAEKDFIDIMLDLIKENVNISGHDADNVVKATCLALVSAGSDTTMITLTWAVSLLLNNHRVLEKAQAELDNQIGINRVHVEEEDIKNLPYLQAIVKETLRLYPAAPFSLPHEAMEECTVAGFHVPKGTRLITNIWKLQRDPQVWEDPLEFRPERFLTSDRRHVDFRGQHFELIPFGSGRRMCPGISFAIGVLHLTLARLLHEFHLGTPTNAPIDMNENPGITLEKADPLHPLVSPRLTSINY

SEQ ID NO: 218 - protein, 538 aa, Tinospora cordifolia
MDSQLTSFQSKPSAYLIAALLALVSAYYLIIKKKSRATYQDNYGKIRAPEPKGAWPIIGHLLLFKPNDVLYQKLSSLADELGPAFMIRLGMRSALVISNWEIAKECFTTNDRIFATRPKLMASKHMGYGGAEVGVAPYGPYWREVRKIITVELVSNHRLNLLKDVRISEIDMSLKELYDLCMKKKKNGSGEESSRVELDLYQWFKDMSLNILVKLIAGKRYYGVAAAANEDEESRRWKKATEESVFLFGQFVVGDAIPLLEGVDVQGLERAMKKTGKEIDAVLSKWVEEHRMKKQQLNGARDEQDFIDVMLNIIKDGKISDHDADTIVKATCMSLVQAGSDTTMLTLTWAVCLLLNNCNVLEKAQAELDDQIGRSKGRIVEEDDIKKLPYLQAIVKETWRLYPPAPLAVPREAMEDCTVAGFHVPKGTRLMTNIWKLHRDPKVWDDSLKFRPERFLSSEHAHVDFRGQQHEFMPFGSGRRMCLGMPLAIGVVHLTLARLLHEFELATPSNAPVDMSEKAGLTLVKATPLNVLIAPRLC

SEQ ID NO: 219 - protein, 531 aa, Tinospora cordifolia
MDSIILQSNLLTTVIIITSFGLFVLSFYYVLWKAIRTGNKRNCSNPKAPEAAGGWPILGHLHLFRGQGLLLHKIFGAMAEKHGPAFTIRLGMRPALVVSNWEVAKECFTANDRALASRPTSLALKIMGYNNSLFAFAPYGQYWRELRKIVMHQLLSSRRLELLKNVWLSEIDIWIKGLYENSLVNKVVDMKQWFGELMMNIVVRLVAGKRSFGKIREGDSEEAKAHQRQIKALRDFFRLVEVFMIEDAFPFLTWLDPRGYQKEMKNIAKELDYLLEEWLEEHKLKQQAACDDQSKDFMDVMLSEVKDSTITERDANTICKATCLNVILGASDTTTLTLTWALSLLLNNRHVLKKAQEELNAQVGKDKQVEESDMKNLVYLHAIIKEVLRLYPAAPLSVAHESLEDTVVAGYHVSKGTQVIFNLWKIQRDPSVWSNPLEFQPERFLTTHKHVDIWGQNFELIPFGSGRRMCPGVPFALQVVSLTLARLLHGFELTTPGGAAVDMTETPGLTNMKATPVEVFLRPDLPHQLYA

SEQ ID NO: 220 - protein, 524 aa, Thalictrum flavum
MPSQTIQIIMDFFHQCVATILFCVLASPFFFYYLLPWWKNANDHDLAKSRGKPVPEVDGAWPIIGHMHMLQPSDSFYSSLAEKYGPIFTLRIGLCKTIVINSWELAKECCTTHDRVFASSPEATAAKILGYDYAMFGRNPYGPYWREMRKIIITELVSNRRLELLKHIRVTEISTSIQELYQLWEARSSKNVKERVVVDMQKWFGDLMLNIGVEMVAGKRYFGASSNEDKEEARQLHKTFKDFSNLFGVPVLSDAIPFLRWLDYKGHIKAMKRCAKQVDCILHRWLEEHKQNKTTIAGDFMDILLSVLQDKEIFGRDADTVIKATCLNMMLGVVETNKVTVTMALISLLNNRRILKKAQEEIDIHVGSDKQVEESDIEKLVYLQAIVKETLRLYSPGLGTREPSEDCTISGFHVPKGTEVMVNVQQIHRDPSIWSNPLEFQPERFLTTQANIDFGGQHHEYIPFGAGRRLCPAISFAVLVVHLTLARLLQGFDFATPKDAPVEMNESVETLEVLITPRLPLHMY

SEQ ID NO: 221 - protein, 534 aa, Xanthoriza simplicissima
MHNPIPNQWLPSSTLLTPIIVSFLVIVLFYIYKKRSSNTIRTKKAPEVVGAWPVIGHLNLFSCPKPGHIVLGELADQYGPAFTIHFGMHPTLVVSSSELVRDCFTTNDKLFSSRLVNKAIKYMFYDQDTISFAPYGPYWRELRKMIALNLLNNERIKMLQQQRISEMDACLKKLYDLSAKRKDENAGVLVDMSKWFAEISFNVVTRIVAGKHIFGPKVERYKNVMEEARRLMDVMVFSDMVPYLGWLDRLRGVDSAIKRTAKELDSVLESWVEEHRRKSVSISAGTGGIFNIKEEEELDFIDIMLSIIAKNNLPGDDPDTLIKAIVQETYLAAWDNTTVTLTWVLCLLLNNKQVLKRAQNELDAQVGKERQVEDSDINNLPYVQAIVKESLRLYPPGPIIERATTEDCNVGGFRVPAGTRLWVNLWKLQRDPKVWPNDPLEFRPERFLNDNADIDLRGQNSELIPFGSGRRMCPGVSFSLQVIHLVIARIIQGFELKAPTDADIDMSTTLGMISWKATPLEVLMNPRFPPVFYK

SEQ ID NO: 222 - protein, 550 aa, Xanthoriza simplicissima
MSTLQISILTVKSPYSQMHYYPLLHQWLPASMALVSLLVIILFSIFKKRSSKMIKAKKAPEVAGAWPLIGHLNLFSGPKLLHLVLGELTDQYGPAFMIHLGMYPTLVVSNWELLKDCFTTNDIFFSNRPVNKAIKHMFYNKESIGFTPYGSYWRELRKMTTLKLLSNHRLDLLKPLRISEMDACFRNLYELWTKDKDGNAWLLVDMSKWFGEISFNVVARIVAGKKNFGSKGDRYKTVMEEVVRLMGLRALSDAVPYLGWLDQLRGLDSAMKRAAKELDSVLESWVEEHRLKRVSVSAGTGSTVKTAKEEEEEEDFIDITLSILAENQLPGDDPDTGIKSLILDMILGGSDTSTVTLIWAMCLLLNNVHVLKRAQYELDAQIGKERQVEDSDIKNLPYIQAIIKETMRLYPAGPIIERQANEDCDVGGFHVPAGTRLWVNLWKLQRDPNVWKDDALEFRPERFLTDHADIDLKGQHLELIPFGSGRRICPGISFALQVMHLALARIIHGFELKTPNDSNIDMSGTPGLLCCKATPLQVLLTPRFNPMFYK

SEQ ID NO: 223 - protein, 520 aa, Xanthoriza simplicissima
MDSLRHCLGGILALLIFLGYLQWKRGTSNKCIEAPQPDGAWPIIGHLPRLMKPQIMHRTLSTMADKHGPAFTLRLGVHKTLVVSSWEVAKECFTTNDRVFATRPTSIAVEILGYNYALFAFGPYGSYWREARKIAILELLSNHRLELLKHVRISEVSTSIRELYQVWKENCDIANGSALVDMKPWFGDLTLNVVVRMVAGKRYMGGSVKSDDVEGRRFQKATKDLFDLFGLFILSDALPFMGWLDLHGHKKAMKKTAKELDSIMQRWLEEHRQSLLDDGTKEEKKDFMYVMLSILEDKKLFQYDADIVNKAICMNMIMAGTDTQMITLTWVLSLLLNNRHILKKAQDEIDSSVGKDRQVEESDIVKLVYLQAIVKEALRLYPPAPLSAQHEAMEDCTVAGYYVPAGTRLITNIRKIQRDPRVWSDPFEFHPERFLTNQANVDFRGQSFEFIPFGSGRRMCPGISFALQVVHLTLARILQGFDFETPMNASVDMTEAPGLTNVKSTPLQVLITPRLHPNLY

SEQ ID NO: 224 - protein, 523 aa, Xanthoriza simplicissima
MDLLNPYFATIFGGFFALLIFLFIISQKRSRIPKIRAAPEPVGAWPIVGHLPMLLGPRLPHFVLGDLGEKYGSAFTLRLGIHKTLVVSSWEVAKECFTTNDQVFATRPSFMAAKIMGYNYALFGLAPYGSYWRELRKISIIELLSSHRLELLKHVRVSEVSTSMKELYEVWAENCSNGNGSVLVEMQRWFGDLTLNISVRMVAGKRYFGTSASLDDDEARRISKATKDFFRLTGMFVVSDSVPFLWWLDFQGHEKAMKRTAKEMDDIFGGWLEDHRRNKLAGGTKVQQDFMDVMLSILEDEKFFGYNADVVTKATCLNMLLGGTDTTMVTLTWALSLLLNNRHILKKAQTEINTHVGKDTQVDESDIVKLVYLQAIVKETLRLYPAAPLSTPHEATKDCTIAGYHVTAGTRLITNIWKIQRDPRVWSNPSEFQPERFLTDQANVDVRGQHFEFIPFGSGRRSCPGISLGLLVVQLALARLLQGFDFETPSDALVDMTESAGLTNLKATPLHVLITPRLHSSLY

SEQ ID NO: 225 - protein, 530 aa, Xanthoriza simplicissima
MDSVHQGQYLPTPMVSVFVFFISLYFLIVWKTRSSSKTNTCNEVPEAPGAWPIIGHLHLLGGSELPHKTLGAMADKYGPIFKIRIGVHQALVVSSSDIVKECFTTNDKVFASRPTSTASKILGYDYVMFGFSPYGPYWIELRKIIMSELLSNRRLELLKHVRDSEIDISIQELYKVWKNHDKSKGPILVDMKQWFGDLALNVILRMIAGKRYSGSIFSSDETEARRCQKGARDFFRLLGLFIIEDALPYLSWFDLQGYKKEMKNTAKELDSVFQRWLEEHKRTRETGELNREQDFMDILMSTLEETKISEYDNDTIIKSTCLSIVTGGNDTTMVTLTWILSLLLNNKHALKKVQDELDSHVGKHRHVEESDIKNLIYLQAIMKEALRLYPAGPLSGPRVADADCTLAGYHIPAGTRLLVNTYKIQRDPLVWSEPSEFRPERFLTSHVNMDVKGLQYELIPFGTGRRACPGMLFALQVVPLVLARFLHEFEPKTEMDMPVDMTETAGLSNAKATPLEVVITPRLQPELYSL

SEQ ID NO: 226 - protein, 528 aa, Xanthoriza simplicissima
MDFTMIIQWLLTSFAILVAFVLIWSSATRSSTRKRNKTAPVAAGALPIVGHLHMLMGRELPHRLLSNMADKYGPAFMMKYGLQPALVVSSLKLTKECFVHNDRAVFKRPRSKALKNLTYDQASLGFAPYGPLWVEMRKVSKTNLLSNQRLQMQRHVRASEVDAFIKELYDLWSSKSNNIKGAPLLVEMNKWFEELALNVVTRMLSGKRHIGFKARRGEDSESMHYKKVVVDATLLTAKLVVSDFFPSLGLVDYLQGDESSIKGTSKELDAILATWVEEHRHKKVSGSEDDEKDFIDLTLSMIDQTQHQGADVDTFIKSMCVGMIFGGSDSTSVALAWALSILMNNRPVLKKAREEIDRQVGRDRKVNDLDVLKLDYLKAIVKESMRLCLVGPLLERVAVEDCEIGGYHVKAGSRVVVNIWKMQHDPNLWSDPLEFQPERFLTTNANVELRGQHFELLPFGAGSRICPGITFALELIQLTLARLIHGFELGTPMDADVDMTETSSVTNYRATPLEILLTPRLDPKLYNY

SEQ ID NO: 227 - DNA, 1522 bp, Berberis thunbergii
accccctatacagtatatggatttgcaaatttcatctcatgttgcagtataatttggcatatgtgagatgaaacagagttttcgtaaatttgacatggacgactcacaaacatatcttcttaaagcataacagatagtcagttacaaataccctgtgcaacacactatgcactaggagtcgtggatacatattcaagaagcttttcatcttgttcgaactcagccatgtcttcatctaacatgttcacccatgcttctatgccatctccggtccttgtatccatcaatataataagatccctacaaggaaaaccacttatgcttacccatgtaggttttccccaaccaaagtcagtttcgtaccaaggaaacctacaccaactactgaatatagccaaacccgtctcacctttggcaactcctgctagtccacccaagaacgattccaagtaggcattaccacatagtattcttctcaaatacttgccatcaattttacttatagcatccctgagcttgcttacaagtatgtgaggctctttcttgccatccaaatcctgacttgccgtgaaggttgatccaaatacatttcctaaggtgttctcaagtccttcaaccttcaatggtggatccattctcctccgaaagttgactgcatgtattgctacatattccttcaagagtccatttttagctcgagttgattccataaaacgcctccatatcaaggctgacacggcttcaatgcgtgtgggatatgagacatgtgagctattagcccccgttgcccttagggatgctatctttgatgcatcaaatacaaaccttttggttacaatctttcctttacctctatgaatgaatgcggatggaatgtaaccaagtaaatctctctgagggaaaatagaggagagctcagagatgggaaggatttcttctttacaattgtgagtttttgcagcccaacaattgatgaatttgctcatggaataagcatcagaaatcttatgtgacaagcacacacatatcattatccctccacaatcaaatacattgacttggatggctaagagtactttggacccaaacttaggtccatgtgcagtatcagcatcatcaaaatggggttcatcacatggtgagaacatttttagtacatcagcaacatttggttgcacaatcacttctgataatagaccgctgacacgagcttctacatagttagcaccttcatcattgcagtcgacagaggtattaccatttatcctccctgctaacgggtagaagctagttaatgtttctgatagagatctcttttggcgacaatgtaaaccagcgttttcaatgtcattgggactgttgtcagcatagaaaaggaagataggaatataaaatggaggagcaatctgatcaaggaagcagaggttgaaggttttaaggtaaggaggagttggagaggatggcttgatggactctcttgagataacttgaaccttcatcttcatcttagagttaaggagac

SEQ ID NO: 228 - DNA, 1986 bp, Chordyalis celanthifolia
aaaatcaatatatctaaaaaaccaattgttaaaacgtccacattacttttgcaccatttgatggttaggagaaggtgcaatgcgctcaccaattcagagatttcaacgccagaagaagaagaagaagaagaagtgggtgtcatatgtttgttatacatccagctaagttgttgttgttgttgcatttgccaaaaactactcaccgatcacaagctagcaactgctttcgttaatggagtatagcagctattaagcaagcttgctctcagtctcatctggaaggaagctcacctatcacaactgcttcaaaggccggaaataaattagagatggcggattcaaaatcatcatctgtagtggaagtcatctccaaagagaccatcaaaccatcaattccaacaccagagcatctcaaaactatcaaaatctccctccttgatcaactctctcctccactctatgtacccatcattctcttctacacagctgctgctgctactgatgatgatgataaagaaatctacgaaaatctcgaatataaatccaatatactaaagaaatctctatcagaaacattgacgcacttctacccgttggccggaagaatgaaagataacatggtgatcgattgtaacgacgaaggtgttgactatttcgaagcacgagtcagtggaaacatgtcagaattcatgaaaccagatgcagtgcctcaatttcttccttatgatgtcagttgtaattactcgggtaatggtaagatacaacttggtgttcaagttaacaagtttgattgtggtggaatagccattggtgtatgcatctcacacaaaacagcggatgcatcatcaatgagtgcattcatcaatggttgggcttccaccgctcgtaccggtgccaccgaatctccaacatttgatttggttcatctgtacccaccttcttgtgtacaaatacccagtgagaactccttcacaacacaagtagaaggagagaaggttgtcacgaaaagattcgtatttgatgcatccaagatagccaacctccgagccaaattaggagatgatgatgatgataagaagacaattacacgcgtccaagccgtgacgggacttatttggaaatgtgccatgtctaaatgggcacatacttcctcttcaaccagttccaaactatccatagcgaatctcgctgtgaacatacgatggaggatggacccaccgttggatcaactgtcatacggaaatttactcacactagcaacagcagcatcaacgacggagggtggatcattggaggaattagtgggccaattgaaggttgctctgagtaaaattgatgctgaaactatcaagtacattcaaggtgaaggaggattcatgaggcttcaagagttactagggagggtacatgagatgtttgccaaaggtgatgaggttgaggtttatatgtttagcagttggtgtagatttcctgtttatgaagctgatttcggttgggggaggccgacctgggtgagctgcagcagtcaaccatacaagaatactgtgatattgatggatactagaagtggcgatggaattgaagcgtgggtgaatttggttgaggatgacatgactctgtttcaacaaaatcaagaacttcttgaatttgttagctacaccgatatttgaccataactgttattcgatattttgcatgcttcaaagtcagagttaactcggtgcgccagccgcccgatcaacctgcctcaattaattgtttgggaactagctagctagctagctaggaaactggttagtcagtattcgttgatctggctgctggcttttgggaattctgtctatagttgtgatgagtgaattgtttgtgttgaggtattcaaatttgatgtagttaatttagaaaaagttaggtttaatttgttttaatattttgcttattattctttaatgaagttgcttaattgtttggcattgtatatcttat

SEQ ID NO: 229 - DNA, 1005 bp, Chelidonium majus
gcctaaaattgaaaataagagaatacaaagtaacaagaacataccgtaagagtacaataccgagaaatccgacaagaaaaagagaaggattaccggagtaagacaaatacaagtatgaaaacaagagaataaagatggtagttaagatggacaaacacgacaattgacctctattagggaaacggttgaaaatcaaaacagttggaggatctctcttaggtggtgttcgaacttggtcatatcatcctccagaaaattcacccacacttcaattccttcaccacatttcatatcgttcatgaaaaccatgttcttgtactttggctcaattaatggaacagtagttacccaaactggcgttccccaaccaaaatcagcttcgtagaatccaaacttgcaccagctagtcataaacaaagctgtcaccttatcttcaacatcactgtctttcgctacggaagcatcatgaccatagatgaacttttgaatgattttctccatgcaacctttatcaccctttaccttatctatttcgcgcctcaatagggctacaaaatcacttaactcatcaagtgccacttgctcttcattactcgtactactaacttttttggttgctggatttgttgttgtcgccgttgttgctggtaatactgctgtaacaaccacacaaagattcccgaatgacgcatcttgtaatggtggatccattttctttctaaagttcatggcatgggttacagtggatatagaaccgggcggagcagatttcactgctgacttccatatcaaagcggaaactacctcaacccttgtcggcctatggcatttgtatttatcatgcatcaaggattgcaatttttcacgtgcagatgtaatctttgccgcatcaaacacaaatcttttgctgacaagtttatctacgctggtactatcctgtgtaggataggaaacttgagatgccaattgttcactaggtggaaagagtgatgtcgaatcgaaaga

SEQ ID NO: 230 - DNA, 1547 bp, Chelidonium majus
cacaacttagaacgctaaccaagttgatcaagatggaccccaaaattaaagtagtactcatctcaaatgagaccatcaaaccttcatctccaactccccatcacctcagaaatttcaacttctcccttatcgatcagttctcttctccaatttatattcccattattcttttctacgaccaagtcatcgatagcaacattgacgacgaccaccgatcaaatcgccttaagagatcgttatcagaaacactaacccgattctaccccgtcgcaggtaggatcaatggaaacgtatccattgactgtaacgacgaaggtgtcgactattttgaaacaagaattcaaggtaagatgtctgattttatggtgagaccggaattatataatcacctcttaccatctcatatagtttccaacatatttgctacggatgcacaattagccgttcaagtcaacgtgtttgactgtggtggactggcaatttgtttttgtatgtcacacaagattgccgatgcatcaagcatgaccactttcatcaacgactgggctgccaccactcgtggttccatggccgaaagtgtgggtcccattttcgaatccgcctcgctcttcccagctagagacatacttaaaacatcaatagaacccgtaccagacacggctggagtagacgtcgtgaccaagaggtttgtatttgacgcgtccatgatagctgctctgcgtgccaagattcagggtactactgttacaagtgtcgggaagtacccgacacgtgttgaggccgtgtccggtttaatatggaagtcaaccatagaaatgagtaaagtaaaattggaatcgggttcttcaacaaaaccgttaaaagcgatggttgtccaccactcggtgaacttgagaaagagaatggacccaccattggctgacgtgtcatttggaaatatcatcactttaacaagcgcagttgcatcatcaactatgatcatgtcccaagaagtagagctggaggaattggtgggtaaactaagggcagccataagtaggatcaacatcagcgattacataaacaaaatgctaggttgtgatgatgatgatgaggagttcgtaagattgcttaaagtgagtaatcgcttcgcaaaagaagtaaataatgatgatcacgttgatggggaggacaacaccgacactgatgccgattccaatgcagatgatgatgatgtttactggatgagcagttggtgtagatttccagtttatgaaagtgattttgggtgggggaaaccaacatttgtatgtacaaaacagtcatacaagaatgtggttattttgatggatacaagatgtggcggtggaatagaagcgtgggtgagtttggtggaggatgacatggccatattcgagcgtaaccccaatcttcttcaatttgtttccacaattaactaattagattggaaaaactagtttgtagatggggtgatttggttaaaaaagtgtaattgatttgtactagataactatctgtcatgtgtatagattattatgcaataaaag

SEQ ID NO: 231 - DNA, 1512 bp, Chelidonium majus
aggagttccaaggcatagtagagtaaagttcattaagcaaaatggtgctaaaggttgaaattatctcaaaagaaaccatcaaaccatcctctccaacacctattcaccttagaagcttcaaactttccttcttagatcagatcactcctcccattcctttcaatatccttttcttctaccctgcttccgatggttcattcgacaatgtcaaacgatctgatcggctaaagaaatctttatcggagacgttaacctatttctacccgttagcaggaacaatcggtgacaacataactgtccaatgtgatgacaatggtgttcagttcttggaaacccaagtcaattgtcaactctctaaagttcttaaacatcctgaagctcaagttatgaagcagttcttgccagaccctggtatgatgtgcaatgaattgggtaagggattgcaattagcaattcaagtcaatatgttcgactgcggcggaatggtgataggaatgactgtgttgcacaagattattgatgcaggatctttgagcacattcattaatgcttgggctcgaactgctcgtggaaccgacgagactttgggtccccgtttcgactccgcatctcttttccctcctaatgaagtacccgggactacattcctaccgatgaaaatgaaccccaattctgctgagaagattgttacaaagaaatttgtctttgatgcttcaaacatagctgctcttagagccaaagcttctcattctgaacatgtgaagaatccaacccgggtagaatcggtgtcagcactcttatggaagtgtgcttggaacgccaaatcgaaatctagtgtggcgaatgtgattgtgaattttcgtagtagaatcgttccaccattgcctgaaaattcttttgggaatctaattgggatgtcaacgacaaagataacgaatcatgaagaagcagagttgcattacttggcaagaaatctgagagatgcgatacggaaaatcaacaatgattacatgaaagaattacaaaatgatggatcattaaggtcgacattagaagcacctcatgaagagttcaacaatgatgaggtagaggtctatacaatgactagttggtgtagatttcctttctatgaagtcgactttggatgggggaagcccatttggatatctactgttaatttgcttgtcaagaacggttttatgttaatggatacaagatgtggaagtggaattgaagcatgggtgaccttggatgaacagaaaatggctgaatttgaatctgatctcgatcgagcttcacaaattcatttctcacaaaaccaatagaccgatgcgtaatcgacttttcgcacaatgcattagattgtaatcggggtttttttagccgttatatgtgtatcaatctctttgtgaaaattaagacagaataagttcaagcctcaagtacattgatacgacgatatctaacgtacttgtagaatatttgctttacacactattgcctaatagccgc

SEQ ID NO: 232 - DNA, 1615 bp, Cissampelos mucronata
aatgcatttatatatatttttcttaccacacccatcccaagttgatgtgttgcatgaaaatcctaatgtatactatatatgtagaatgctctagtgtgataaaatacagaacatataaagaattttactccttatgcagtgagaatagtaacccttaatggatgaccaccattagagaagactcagaagagtagaaccttagttgatgatgaagggcactacaggtgctcagtcaagactcaagtattggaaacaaaggagaggaactcctcatctttctccaactcaaccaagtcttcctccaccatgttcaaccaagcttcaatcccatcaccaaacttactatctatcagtatcacaaggttctttccaggagtcttagttgtggaaacccaaatgggccttccccacccaaaatttgcgtcataaaaagggaacctacaccaactgttgaagttcattgccacaacctctccttttgagaactgcttctgtatttcttcaattgaattcatgaacccttcttccccacattgaagtttcctcacataatcaccatccactctcctcattgcatctctcaagtgcttcaccaacacatgacgatcacttcttgtgtcacttccaaactccacacattttgtaattgttggccttgatgcattcccaaatgcattgcttggcagtggtggcaccattctccccctcaagttcactgcgtgcactgctatagatgccctttcaggtcctgcctttgctctagtcgcggcaatggcgcgctcccaaatgaacgccgacaccgcttctactcgagttggatgctccacttcggtgcctcttaaagcagcaaccttctcgcccttgaatacaaatctcctggtcacaatgttgctaccttctccaactccaccgcggccactcggggttgctccatctgaatctttagcagggaagagagaaggcaagtcgaacgacggattaggcagagcatttttactagaaccattagctgcatcagcccaaaatcttatgaacgtcgccattgctgctccgtcggcaatcttgtgcgaaaagcagacgcctaatgccatcccgccgcaatcaaaatagttggcttgaactcctaggagtgccttggcaggcaattcttcattagtcacataaggtgcacaaggaagaagtttatcaaggtcatcaatgttaggccgtttgagaaactcagcgagtcgaacacccgccttggcttccgaaaactcgactccctgaccatcgcaatcgactgcggcgccatccctgattctccctgccactgggtagaaatgagttaaggtttctgaaagagatgtcttcagctgatcagaccttttggagatgtgatcttcatggtttccaacaccacaacctgatgggtagaagaggatgatagtaacatagtttgaagtggctagatgatccaacaaggacagtttgagagagttttcgcgatgaggatcgactggagtcgatggtgagatgttctctctagagattatttggacctccatgtatgggtaaaaagaggctcttctagattgctaattttgtcctctgatgaagactaggccagcagagtctt

SEQ ID NO: 233 - DNA, 1732 bp, Cocculus trilobus
taggataacataaaaacagtagacctgatttagcaatctcatgattgaaaactgctctctagcccttcctcctctttccctatcacagtacccaaagtgcacccttttgagtcctaatgattcttcctttttatttgcaacaaataactaatctaggacaacatgattctcagataaagaaattccagagcaacttgtctaaatataccaacatgatcatcacaatttcatagatataacttctttgctttctaaatttccatgagttcttggaaaatcttcatggatgaagcagggagaccaagaagaacatttatgcttttcctctctttcccatgagacaagaacaaaatgacttccttctcaggcagagtcactggccctgataaaataggttctccccacccgaaatcggtaatatggaatgaaagcctagaccatgtggttattagaagagttgcagcaagtgaaggcctggctcttgttacttcaaagtaatctatagctgatctcatgtaactatcagtgaccatcttcaccgccctctgaaccaatcccactgtaaatgacaatggattctccaacacctcgcccgcattgcacaaagagttcgttaacacgattccgttcccagagtatccctttggcaatgggggctcgaacctaggcctcccatccacagcaaagaggagctttatctgttgatcaggtttcatcttcaaggcctcacatctagccttccacacaaatgcagagagagcctcaaaggttgtgcattttgcgatgacattatcttccatagcttttttcttgagttgttctarcttctgagtgtcaaagcagaaggacctgtagagcatttcctcttcgtagagactggaagtkttcgatatrtcctcgatctcygcgaattcttggtgggtaaactctattttaggagggattcgagccttgagtatgcttctgtctaggaacggcggaacagttagcggttcacctcgggcggtctctccccatgagttcacgaactccatggctcctagaccatcaaacatgcaatgattcatgcatagcccaagaacgaatcctccacacttgaattttgtaatctgagccacgagagggggcatttcaagtatgttctttgcaccaggaatgtcataaaccaactttcctagtgtcactggatcaggttttgtgatgtctcctatgtcttccatcttacaatctgcctcagcctcaacaaaaacacctccttcgcctgtgcaatggacgatcaacttcccttccgaactgatcgtaagacgcccggccatgggataataatgaacaagaacctttgccaaggcatcctttaggacctcccctgctctctcattacccttctcttccgacttgaagcaataaacagttcgaatgatcaccgcgatgttttggtcsaggttagagaggaagtagagacccttcggcgtgtcctcagcaggaggaacaagagttggttctcctaccttcacactaagctcaaacacattcccattagaagatttctgatccattgcaacagactctccaagctcaacaacctgaaaccaaaaagaagaagataaatttttttttattagagtactcataaggagagacccatatcatatgatggaacaaagtgatcatagttgatgcatttaaatgtgatattccttagtttgttagaaaacagaccatgtgtaagaac

SEQ ID NO: 234 - DNA, 1641 bp, Eschscholzia californica
ccattttaggcccaactatccaaatttcgatcacagcatcacattggcgttttaacaatagtacctaatctcatgtttacttgttcttgtaaacagaaaactgtcaattacgacaacccatatcaataaaacgttgcaatatgactaagtgagacgaaaaatcgttaaagctagtggatataaaacatttgatgaataacataaagtatgataacattctctaaaaaaatgaaattacatatattaatttgtttataacttacgcgtgttcacttagttacataggcaaattcgaggaggttctcattacactcgaaagcggtcatatctttttcttccaattttacccatgcttcaattccttcaccatctctagtgtccatcaaaacaatcccattcttggctagtgcttgacctacactataagttacccaaactggttttccccatccaaaatcactctcatagaatggaaatctacaccaactactcatcatatacatatttttaccatcttcattcatcaaacctgcctccttagttacccattttatgaactcttcaccactatcacctcgaagttttctcacataatcttcgtcgatcttatgtattgatacccggagatgtcctaccaattcatctaacgaataagaattcttcggtattaaggttgttgttgccaaggtcactatattcccgaatgactcttgagtcaatggtgggtccattttccttcttaaattcacagcttggtttaggattgacatagactctgcctcagggttcatgagtgatttccaaattagagctgacacagcctctacccgtgtcggatacttcccattagaagttttggctatcctggcgcgtaaacttgctatattggctgcatcaaatacaaatctttttgctacgagtttgttttcaattgttccatctttgagttcgacaggcgtgtcaggtacaggaaacgatacttgtctaactgaaaagagagaatgggcgtcaaaattaggaatgacaaattcggtttccccacgagccgttgctgcccaacagttgatgaaggttgcaatagatgatgcatcaaagagcttatgcgacatacacatcgatattgctattcctccacagtcaaacatgttgacttgaatgatcaatggtgttcgactggccatatctaaagtgggtatgagctgattaagtagatctgcgcttctaaattctgtgatgttaccattgacttttgcttcgaagtagtcaacacctagatcgttgcactcaacgaagatgttatctttgatcctaccggccaatgggtagtaacgggttaagacgttagacaaagattttttaagtaaatgatgatagttagattcggattcaaatgaatttgtgtgattagattcgaagaaaagaacgacaggaacgtaaactggataaataacctgatcaagaagagagagtttgtatggagaaaggtgagaaggagttgaagaagagggtttgattatctccttagaaatgactcttaccaatttatccatcattactgccatgaatgaatcttttgaacaatctgtgaggactttatattatttttttctctctctctatatttcttcatcttatagatgt

SEQ ID NO: 235 - DNA, 1723 bp, Glaucium flavum
cctccctttggtcggccgataaaaggcctccctttggtgggccaataagtgtcctacgataaattcaatagtacccaatgtattgatatttttcaaacaattacttagcagatcgtggaagcaaattccaggagttgggcgtcacgctcgaatacggccatatcatcctccactaaacttacccacgcttctattccgtcaccacaactcgtatcaatcataataactacatttttataggactgatatgaacttaccataactggtttcccccacccaaaatcactttcatacagtggaaatctacaccaactacccatccagtaaacctcatgatcgtcatcgctgtcgtcgttgtggtcagtgacctcgtctccattatttacttttttcgcgaaacgaccactctcgttgaccaatctcaagaactcctcatcatcatcaccaccactttgcaatttcttgatgtaatccccgttgatcttacttatggctgccctaagttgtctcactaattcctccacgtctacttgtttagccatcaacatcgttggtgatgctactgcggttgccaaagtgatcatatttccaaatgaccggtcagccaacaatgggtccatcctctttctcaagctcaccgtgtggtgcaccaccatacactttaccggtttccttaaggaactcgattcgatttttaattttttcactttactcatttccatgaatgatttccatatcaaagcggatacggcctcaacgcgtgacgggaagtatccgactcgtggagtggaggtgttctggattttggcgcgtagagcggctatcatggatgcgtcaaacacgaacctctttgtcacgaccgctttattaacgtctccgattgtacgattgtctatcccatgcgtgtccggtccgggtactgctaatgtgttaagtatttctctcggtgggaagagaaaggccgacttgaaagtgggcgacagagtttttgtggatccacgattggtggcggcccagtcgttgatgaaagtggtcatagaggatgcatcggctatcttgtgtgacatgcaaaaactaattgctgttccaccacaggcaaacacgttgacttgaacggctaattgtgcatctttagccaatatgttggaagctatatgacatggtaagaggtgatggtgttcccgcggtcttgtcataaaggcagacatcttaccgtggattcttgtttcataatagtcgatgccttcatcgttgcagtcaacggatgagctatctttgatccttccagcgacagggtaaaattgggttagggtttctgaaagcgatctcttaagccgattagatcggtggtcaatatcatcgacttggttcccttcagtaggacagtcaccaaggggtgcagcagcagcatagaaaagaatgatgggaacgtaatgtggactagagaactgatctaggggtgtaaatgggcagggccgtaacggatagggcagggcagcgtatgtcatgaaatatgatatccattaaggcccttagggcagggcaaggtagtcctctttacattttctcttgcccactactctcccaatcctggtaccctagtagagcaggacgggcaaagtcgggcagggtacagggtacttgaaatgtaacaatacagttttaagcataaaaaaattgattttacacttgaatttagaaatcagatatttgttttatacaa

SEQ ID NO: 236 - DNA, 1741 bp, Glaucium flavum
gagacaaaatctaattactagattcgaactgatacgtttagtagatcaatactcttggcatgcaaaacataccaagatggagcctaaatatacacatttattgcttcattacaaacgaaatatgtatactgaactgtaatacaaaatataaatatcaacaatagacattatcacacaaccaaatacacaaaattataggaacataacatgattgaatttgaaacgaagaaactttgaagcacccggcaggagatcgaaatatagtaacattttccttttttcacctcagactgatcgagctgaataagaagttattaagtcgccaggactaggaatctaagaagcaaatttaagaaattccttgtcacattcaaattcatccatgtcttctttagtcatgttcacccatgcttctattccgtctcctgatctcgtgtccatgaacacaacaacatttttgaaaggaagcggagcagtcgctgcccaggttggctttccccatccgaaatctgcttcatatatgccgaacctgcaccagctactaaagtgtagcatcacattcgacgtctgattatttgaagcagcgttttccatttgtttcttgtaaaaattgaagtatgcatctgtatgttgtagtttcctaacatgatcaccatcgattctctttatggcctctccaattttcacaatcaaggttggatacggatgatctcccttgccctcagcatcaacgaggagcgcaaaagtaggactatacatattgccaaaagcgtttgttggcaattgtggaaccatccttttcctcaaattcactgcttgtgttaccctatacacccgtgccgaagcttcttcttttgcttgattcagtttcatgaaacgcttccaaacgaaggccgataaagcttcaacacgggttgggcactctcgatgtccgtcgccgtttatgttagtagcattggtttctactacactttgtttcttgagttcagttatcttggatgcttcaaaaacaaacctctttgtcacaatttgttgtttgtttttcttgatacttcctagggtattataacccatcagatctaccttgggaaacaaagttggcaactcaaaacaaggatccataatttgatcagtagcaccacgagcacaagcggcccagtcgttgataaacgtagacagtgaagaagcatcagctagcgtgtgtgagatgcatataccgatcactattccaccacaatcctcaaagacgttcacttgcacggccaagagcacttttgacgtgacgggtgtggactgattggtgctgtacgaatcacatggcaagaattgttgaagtacatggacctcagggtgttggataatttgagagagttcaccattagttactttggtttccaaataatcaacaccctcatcgttacaatcgacagagccctcatcttggatccttccagccaatggatagaatctggttaagctcgcagataaagatttcttaattatgtcaggaaaatgagagttattgtcgttgtcgtattcatcacttttgtagaaaagaacaagtggaacataaattggaggagcaagctgatcaagaaaagataggttgaaggttctaaggtgatgaggagttggagaggatggttttatcatctccctcgacactacttcaaccttcattttcatggtgttaaaatcttggcttagttagctaagagttgaagaaaactttattttcttt

SEQ ID NO: 237 - DNA, 1738 bp, Hydrastis canadensis
gcaacattggaataaatctcttgattcactcactttaattggatcaaacacaacaatttcatttattaagagtaacatttcaaaagattctgggcaaaatgactctaaatgttgaagttatctcaagagaaacaatcaaaccatcctctccaacaccccatcaccttaaaaacttcaaactctcacatttagatcaatacactcctccaattggtgtccctataattctcttttattcggcaaaccatttcgaaaaaacaaaaatgtctgatcggttaaagaaaacgttatcgaagaccttaactgatttctacccattaggaggaaagatcaaagataacaactcaattgactgcgacgacagtggtgttgaatacttggaaactcaagttaaagctcaactctaccaatttctcaactgtcctgaagctgatgaattgaatcaattaattccattgaatctaaactgcactggaatgagctcagaaatacaattagcaattcaagtgaacgtattcgaatgtggtggaattgcgatcgcagcatgtatatcacacaaagttgctgatgcatcaagcttgtgcacatttttaagtaattgggctgccaatgctcgcggggctaatcatgttgtgtttccacagtttgattcagctccactcttccctcctagagaagtatcttcacttcaactaagcaccgaaggcccaacgcacaacgttgtcaccaaaaggtttatcttcgattcatccaatatagctgctctcaaagccaagtctgccaattatgtggagaatccgacaagggtggaagctgtggcgaccttcctatggaggtgtttcatgaatgtagctagtttgaaaccaggatctataaaatcatttatggtgaacattgcggtgaatttgcgtagtagaatggttccaccattgccagatcattcttttggtaatctcattatggctgcaatgccttcctccacggcggatagtaaagcagaattgcattgtttggtggggcagttaagggaagcgataaggagatacgacggtgattatatgaaaaatttacaagatggtgatggtgtatcaatgttttatgattctatgagacaggcaattgaactatttgccaaaggagaaatggggttctacacaattactagttggtgtaggttccctttctatgaaattgattttgggtgggggaagcccatatgggcaagttctcttaacatggttcataaaaatgtggttatcttaatggatacaaaatatggtgatggaatagaagcattggtgactttggatgaagaagacatggcaagatttgaatgtgaggaagagctccttgcttttactagccccaagaatatagcttatgtgcaagagctccatgattttactaaccccattaagatggcttatgaacaagaggtccttgcttctactagcccaaatgggatggcttatgagaagagatccttgatttcactaggctaaatgggatggcttatgagttcaagtcaaccatgattcctagatcatataatcaccgtctttaattatgttctcctttcttttatgcttcttagttgttaaaatgttgctgttttttgtgtgtgtgtttgtgtttgtgtgcgcgctattatgctatgttcaaagccagagtagctcgtacctgatctttgatctattttgtgatcaagctattaaaatgccattcctagttattttgg

SEQ ID NO: 238 - DNA, 1721 bp, Jeffersonia diphylla
ccaatcaaacaacagaggactaggattccaccaggaattcatcaggaaaaatcccaaatgaaaaaatagcaaggattccatttcttcggagcaattttccctgtgtcctgcaatcaaactagccctaattgaagttggtgattacatcaaaaagctttcagactagtactaaagtggcgaaagcaaacatcctgtgtgtggcttaactcaactaacagtccacacaatgagttgaggagagaaatgagaggagttgttcatcttgttcaaattcagccatatcttcttccgccatcctcaccaacgcctcaatgccatctccagatcttgtatccatcaaggcaacaacatttttgaaatcattccttgcagaaataccagtagcccatacaggctttccccaaccaaagttagccttgtacaaaggaaacctacaccaactagtgaacattatcagccctgttttacctgtgctaattcctttgctatattcatcctctaaatgttgaatgtattcaccatcacgtcgtatttttgtcacaaactcgctgtccatttttcttatagcatctctaagctcgcccaccagcacatacaactcattttcgcttgctaactctcgacttgttgtgaaggttggagcacaaagatttcccaaggcgttctccaatcctttaccatccattctctttctcaagtctactatatgcattgccgcacattcctttaaaaacccattttttttcctagtcaattccatgaaacacctccataataaggcagacacaagttcaacgcgcgttggggatggaacacatgagctattattatttatcacctcggctctaagggatgcaatgttggatgaatcaaatacaaacttttggtgacaaggttcggtatagttgattgaaagggagcgctgttaaggtccaaaccactaggaggataaagagacgataattgttgagagatggggtggattagttgattagaatcggaagtcttagcagcccaagaatttataaatgtgatcattgagtaagcatctgaaattttatgtgacaagcaaacactaataactattcccccacactcaaataaattgacctggattgctaggagtacttttaaagataactggggttcttgatcatcacctggcgaaagcagttcaaggacttgatccacattgcgatgtttaatgacatcttcgagttgagctttcactcgagcttctacatagtcaacaccttcatcgttgcattcaattgcaatatatccgttcattctcccagctataggatagaagctacttaaggtttccgacagagatgtcttcaagcggcgggatatgtccgaaaactctatcttcttcgtatccttattatcatagaatagaaggatagaaaccctgtcaaaaccggctagcagatcaaaaagacctaatttgaaggttctaaggtgaggaggagttggagtagatggtttgatggactctctggacattatttcaacttgtattgacatctttaggtgagtgtgaattggtattcactgatgttgctctctatataattgagctcactatatgttgtgctgatcaaatttcatttggattcaacttgtattgcaatgccttgcattattgacaaataatggacaccctggaaagygayarsaracaagtaatggatattttgtttgttgtcacttgcgag

SEQ ID NO: 239 - DNA, 1565 bp, Mahonia aquifolium
ctcattcttccaagtcttttcgcttgctagaatccgcggtgatcattcgagaagagaagctttttgtatctgtatatacagggtaaagatgatcgtaaacatcaaggaaaccacgatggtgcgcccatcagagccgacgccaaaacggagcctatggaattctaatgtggacttggtggtgcctagaatgcacaccccaagtgtttacttttataggccaaatggttcatcaaatttctttgatgccaatgtgctcaaggaggctttgagtaaggctttggtaccattctaccctatgggtgctagacttaaaagggatgaagatggcaggattgaaattgattgtgatggacaaggagtgttgtttgtggaggctgagaccgtgtcggttatcgatgattttggggactttgcacctaccttggagctccggcaactcattcccactgtcgactattctggggatatttcttcgtatcctcttcttgtgctgcagataactcatttcaagtgtggaggggtctcacttggagtagggatgcaacaccacgtggcagatggagcatctgggctccacttcatcaacacatggtccgacatggcacgtggacttgacttgaccatcccacccttcattgaccggaccctcttacgagcacgtgacccgccgcgacccgctttcgaacaggtggagtacttacccccacccgcgatgaagaccccgctaagtacacccacagattccacctcagttgccatcttcaaaatcactagggagcaactcaacatattgaaagccaaatctaaggagggtggcaataccatcaactacagttcctacgaaatgctcgcgggtcatgtgtggcgatccgcgtgcaaggcacgagggttaccgtatgatcaagagacgaaaatgtacattgctaccgatggacgatctagattgcgcccagcacttccaccgggctacttcggcaatgttatattcaccaccacccccattgcggtatccggggacttgagtgctaagcctctaacctatgccgcgagtgtcattcatgaggcattagggcgaatggacgatgagtacatgcgctcggctctwgattatcttgaactacagcctgatctagcggccctcgttcgtggggcacactcatttagatgtcccaacatcgggatcacgagttggtcgaggcttccgattcatgatgcggactttgggtggggccggccgatcttcatgggccccggtgggattgcttatgaagggctcgcatttttgctgccgagcccgatcaatgatgggagcttgtcattggcgatttccttgcaatcggagcacatgaaagtattcgaaaaaattctttacgaattttaatcaacaaagagtggtgattcaatgaggttaatctcacagcgctcacttaataagagtgagactctcatccattggatcgaatggatagatctaattcttttattccatttaattaaaaagaatggggggaagttagaagtggaaatatcacaacctgaacattgtgtttctttagccaattgtc

SEQ ID NO: 240 - DNA, 1639 bp, Menispermum canadense
acacaaatgaagaagatgatgaagtacatgaaggtccaagtcgtttctaaagagaccatcaagccctcctctccaaccccacctcacctcagaacctacaacttctccctcatagatcaacacattcctcaacttctttatatacctttcatcctcttctactctcccaatatacatcacaaggaccacgatgatgatcatcatcgtcaactcatcaatattcaaacacaaagtcttgatcggctcaagacttccttgtcagaaacattaaccctgtattacccattagcagggaggataaaaaacgacagcataatctgctgcgaagatgaaggcgttgaattcgttcacaccaaagtaattgattctcccctcttagaacttgtcaacaaagctgaaccagaaaatctggctcaactcctcccgcgtcacgatcatcaacgcaacgaaaagccaccactactgagtattcagttcaatgcgttcgagtgcggtgggatggccatcggcctttggttttcacacaaagttgcagactcgtctagtctctgcactttcctccacaactgggcctctattgctcgtgggtcattgtctagtactgaaatcttgtgtcccaggttcgactgcgcgactcacttccctccaaaacaactgatgtcgccactgcaacatgtcaaaacaaaaggagaagtggtttcaaggaggtacatctttgatgcctccatgatagctgctcttaaagctaaagccagtactactatcaaccgcaactcatcatcgtcaatatcgccttcaagggtcttggcggtgatagcgttcttgtggaggactgtgatcgccatggatagagagaaacaattagggtctattaggcctttaaacatgggcattgcagtgagcttacgttctaagatggagctgacattgccagagctttcgtttggaaacctcgttgccatcgggatgacatccgcatttcatgagcaggaagtggtagaacgaattggggatttgttcggcaaattcaatagagattacgtgaaaaagctacagtccggtgaggagtacttgaagttgatggagtctttgggagaattggaagagcagatctgtagaggtgaagcggagaggtatggagtgactagttggtgcaggttcccattctatgaagttgattttggttggggaaagccagtgtgggctaacgttgctgcttttgaggacaataacttttttgtgttgatggatacgaggtttggtgagggaattgaagtttgggtgagcttgggtgaagatgacatggctagattccaacgacagttggatcgtgagcttctagtacttttcaactcgttcagctcggttggatcagcttgatgaaatattaacgctaaaataacgtacctttcttgcacaagtgttggaattcattagatatgcatggagatgtagtatgtatctccatgtacatatgcgcatttcaatatgtagacaattgtgtaagaaatatgcacgtgttaagaaatatctatataattgtgttattgtagcattatcgtcgctacatcttactcaagtgctcaagtgcttaacaagatgtagattaagttgacgaccctttgtataattactcatt

SEQ ID NO: 241 - DNA, 1495 bp, Nandina domestica
ccgatctgcagtgatgaaggttgagaaaatttcgagagatttcatcaaaccatcaactccaacccccgatcaccttcgaaccttcaggctgtctcttcttgatcagctcgctcatccagtttttgtccccatcattctcttctactctagtcccacaactactcttgatgatgatcatcagctaggtgtatctaatcagctcaagaagtctctatcggagaccttgaccctcttctacccgttagcaggaaggatcaaagataagctcttggtggattgtagcgatgaaggtattgagtatttcgaatctcgagtcaacggtaaaatttctgattttatgaaacgagatgaactgcatcatctcctaccttatgatttccaatctaccttgaatgtaattgttggtaacgattcacatttgatcgttcaagtcaacttgtttgactgtggtggaatagcaatttctgtttccatttcacataagctagccgacgcagcaacattgaccacatttatcaatacttgggcttccatcactcgtcaggcaatccccgaatcaattgtcagtccgacttttgattcagctattctgtatccacccagagaaggaatgtcctcacccttttctggtgcaattaataagcatttgaccagtaaggtacaagctggacaagccgaaaagagagtgacaaggaggtttgtgtttgatggcaccaaaatagcaacccttcgagcaagatatggtaattccaatgatgagaagaagaagaagaagaatttgcccacacgagtggaggctgtgactgcacttatttggaaaactgccatggcagcaacttcttccccaaaaccatcgattgcaaacattattgtggacatgaggagaaggctggacccaccattgccagagcaatcatttgggaatctcgcgacaacagttgcaagagtggcaccatccataacaaagagtactggagagatggatctgctgggtccaatgagggaatcgatacgtaaaatcaacagcgattccttgaaggtgcttcaaggtgatggagggttcataaagtttcaagagtttatgaagatggcattggaaacaaatgggaatgaattggagctatataggtttactagctggtgtagatttccggtgtatgaagcagatttcggttgggggaagccgaattgggtagctgttgctagtctgccattcaagaacacctctcttttgatggatgacagaacaggagatggaattgaagcctggatttgcttgttggaggaagacatggctagattcgaacgcgatcaggaactccttgatttcgttactttgttggactgagcagctcatgaactcctctttgttttcccgcaataaaatcaaatgtcatgtcactcaattcttacgtatgtatgcttgtatgaactgatattgactcgtactaattactttcctgttgttcattggatatggatctagctggtttct

SEQ ID NO: 242 - DNA, 1432 bp, Nigella sativa
tctagctaccaaggaatggaattgtaagtgtgtatattgatgcaaaatgactccgaaagtttcagttctgtcaagggaaactatcaagccatccctaccaacgcctcctcatctcagaaccttcagactctcccttttagatcagtacagttttccagttcgcgtccccgttattcttttctattttaacgatggagagaatgatcacactaaaatatccaagttgaagacatcgctttcggatatcttaacccatttctacccgttagctggaaggattgtgggtgatcgtttgattaactgtgatgacagtggtgttcagtacttggaagctcaggctaatacccagcttgaaacgtttctcaaatatcccaaagcggatgaattaaatcaactgctaccactgaaactacaccacaatgatgagagctcagaaacacaactgcaaatacaagtgaatacatttgaatgtggtggaattgcaattgctgcatctatatcccacatggttgcagatacagcaactttgtgttcattcataaatacatgggctgccaaaagttgcgggtgcagcaaaactatgcccccctgttttgattctgtagcactcttccctcctaaagaaataccttcattccagcttcccatgggagatcaaactcaaagggtaatctccaagaggtttgtcttccattcagcaaaacttgcagctttaagagccaaatcagtgagtaagctggaggtggagaaccccacacgggtggaggtcgtgtcagcacttgtgtggaaatgtctcatgaatgctgccactcggcgacaggggatgtcgtttacagtgaacatggcagtgaatttgcggagtagaatggttccaccattgtctgacaattcgtttgggaatctcattataggtgctttgccttctgctgaaagaggcgaagcattacattgtttggttgggaaattcaggaaaatgattaaaagagattactcgaaattaccggagaataatggaatatcaatatttcatgatgggttaaggaagacaatggaggcggcagcgagagggaaaattggaatgtacacaataactagttggtgtagatttccgttctatgaagctgatttcggatgggggaagccgatatgggcaactactgtgaatgtggatcataagaacattgtgatgctaatggacaccaaagatggtgacggaatagaagcattggtaacactagatgaacgggatatggctttgttcgaatgtcagcaggagctactcgactttgccatcccaaattcaatggtttcttgatatctacatctcctgccagcatctaacaactcagttgccaaagctgagaggttatgggttcaaactcgcaactgcttatgattgataaatgagttgtatacgtaagttgaagagagg

SEQ ID NO: 243 - DNA, 1705 bp, Papaver bracteatum
cagaaggcatcatgttgggaaggtgggaacaaataagctggagtatcttgagcacttgttcatgtctcaccttagtgtgaatcaattgattaagaccttgaatattgatattgtacagttgggattatatggaagctttgtctagtgttgatgtcgaagtgatctccaaggaaacaattaaacccacaactccaaccccatatcaacttagaaacttcaatctgtcccttcttgatcaatattgtcctatagtttatgttccaatcattcttttctaccctgctgcagtcactaatagttctggtagtaagcaccacgatgatcttaacttgcttaagagttctctttctgaaacgctgggtcaattttatccactggccggtaggatgaaagacaacattgtagtcgactgtaacgatgaaggtatcgactttatcgaagtaaaaatcaagagtaaattgtgcgacttcatgatgaatccagatgtacgcttaagtctgcttctcccatctggagtcgtttccatgaacttcgttaaggaagcacaggtgattgttcaagtgaacatatttgattgcggtggagcagccatttgtttgtgtatatcacacaagattgcagatgcatgcaccatgagtacattcactcgttattgggcagccaccaccaacacagctcgtcttgggggagctatcggtcctccaaacacaaatccgttgtttcttccttctttcgactcggcatctcttttcccacctaacgaacaattggcatctcaatcagcgatgccatccgttacttatcctactgaggatagccgaagacatatagttgtcagcaaaagatttgtgttcgatgcggtaaagttaaaatctgtacgtgaaaagctacaagtattgatgcatgataaatacagatcccgtaagccaacaagggttgaggtggtttccgctctaatatggaaggcagccatgaaatccgctccgtctggtgcttcatcgacggtaaaccatgccgtgaactttagaaagaaaatggacccacctttacaagatgtgtcattcggaaatctttgtcaggtcgttgcagcattattaccagcaacaacgccggaaacaacagaaaattcagataacaagacagttaatagtacaagtaatgaagtgcaagtggcacttgatgagttaaatgatttcgtagctcaattgagaggcgaaatagataaggtaaagggcgacaaaagttgcatggagagaatgtttctaaatttcatgaatggttatgatgcctccgaaacgaaagacagtgatgttgaagatgaagtgatagctttttggatgactagctggtgcaactttggtttatatgatgctgatttcggttggggaaagccaatttgggtaactactgatccatttatcgagccgaacaagaacataatttacatgattgatacaaaatgtggtgaaggaatagaagtgtgggtaaactttcttgaggatgatatggctaagttcgagcatcacctaagcgagatcctcgaattgttttgattttgcatcatctactttgtgttccaaaatcatgtttggttttcgttattttctttaataaagagacttattgcaattatgatgactatatgcacatcctcatttttacactttgaatccttgctaaagagaagtgttcctttctaaacgaa

SEQ ID NO: 244 - DNA, 1751 bp, Papaver bracteatum
aaaagaatctaccttgaatattgatattgtacagttgggattatatggaagctttgtctagtgttgatgtcgaagtgatctccaaggaaacaattaaacccacaactccaaccccatatcaacttagaaacttcaatctgtcccttcttgatcaatattgtcctatagtttatgttccaatcattcttttctaccctgctgcagtcactaatagttctggtagtaagcaccacgatgatcttaacttgcttaagagttctctttctgaaacgctgggtcaattttatccactggccggtaggatgaaagacaacattgtagtcgactgtaacgatgaaggtatcgactttatcgaagtaaaaatcaagagtaaattgtgcgacttcatgatgaatccagatgtacgcttaagtctgcttctcccatctggagtcgtttccatgaacttcgttaaggaagcacaggtgatcgttcaagtgaacatatttgactgcggtggaacagccattagtgtgagtatatcacacaagattgcagatgcagccacaatgagtacattcactcgttattgggcagccaccaccaacacagctcgtcttgggggagctatcggtcctccaaacacaaatccgttgtttcttccttctttcgactcggcatctcttttcccacctaacgaacaattggcatctcaatcagcgatgccatccgttacttatcctactgaggatagccgaagacatatagttgtcagcaaaagatttgtgttcgatgcggtaaagttaaaatctgtacgtgaaaagctacaagtattgatgcatgataaatacagatcccgtaagccaacaagggttgaggtggtttccgctctaatatggaaggcagccatgaaatccgctccgtctggtgcttcatcgacggtaaaccatgccgtgaactttagaaagaaaatggacccacctttacaagatgtgtcattcggaaatctttgtcaggtcgttgcagcattattaccagcaacaacgccgggtgcttcaccaacggtaaatcatgccgtgaacctaagaaagaaaatggacccaccattacaagatgagtcattcggaaatctttgtaaggccgttacagcaatattaccagcaacaacaaccacgacaacaacaaaaaatgaagacaacaaaacaatcaatagtacaagtaatgaagtgcaagtggcggtacttcatgaattaaatgattttatagctcaactgagaagcgaaatagataaggtaaagggcgacaaagattgcatggagaaaatcattcaaaatttcatgaatggttatgagtacgccaccacaaagaaaaaaaatgatgttgaagatgaagtgataaccttgtggatgactagctggtgcaacatgggattatacgagactgatttcggttggggaaagccaatttgggtaacgaccgatccaaatatcaagccgaacaaaaacataatttacatgaatgatacaaaatgtggtgaaggaatagaagtgtgggcaaactttcttgaggatgatatggctaagttcgagcatcacctaagcgagatcctcgaattgttttgattttgcatcatctactttgtgttccaaaatcatgtttggttttcgttattttctttagtaaagagacttattgcaattatgctgactatatgcacatcctcatttttacactttgatcactggggagtaaatttttgatggggccgtttt

SEQ ID NO: 245 - DNA, 1710 bp, Papaver bracteatum
cagaaggcatcatgttgggaaggtgggaacaaataagctggagtatcttgagcacttgttcatgtctcaccttagtgtgaatcaattgattaagaccttgaatattgatattgtacagttgggattatatggaagctttgtctagtgttgatgtcgaagtgatctccaaggaaacaattaaacccacaactccaaccccatatcaacttagaaacttcaatctgtcccttcttgatcaatattgtcctatagtttatgttccaatcattcttttctaccctgctgcagtcactaatagttctggtagtaagcaccacgatgatcttaacttgcttaagagttctctttctgaaacgctgggtcaattttatccactggccggtaggatgaaagacaacattgtagtcgactgtaacgatgaaggtatcgactttatcgaagtaaaaatcaagagtaaattgtgcgacttcatgatgaatccagatgtacgcttaagtctgcttctcccatctggagtcgtttccatgaacttcgttaaggaagcacaggtgattgttcaagtgaacatatttgattgcggtggagcagccatttgtttgtgtatatcacacaagattgcagatgcatgcaccatgagtacattcactcgttattgggcagccaccaccaacacagctcgtcttgggggagctatcggtcctccaaacacaaatccgttgtttcttccttctttcgactcggcatctcttttcccacctaacgaacaattggcatctcaatcagcgatgccatccgttacttatcctactgaggatagccgaagacatatagttgtcagcaaaagatttgtgttcgatgcggtaaagttaaaatctgtacgtgatttgcttccttctttcgacgcggcaactcttttcccgccgagtgaacaactggtatgtccatcagaagtgccacccacacccgtttcccatcataatgacgatagcggaggagaaaaaagtgtcagcaaaagatttgtgttggatgcggtaaagataaactctgtgcgtgaaaagttacaaggattgatgcatgataactacaaatgcaccagcaggccaacaagggttgatgtggttacggctttggtatggaaggcagccatgaaatccgctcctagggatggttttttaccaatggtaaatcatgtgatgagcttcagaaagaaaatggatccaccattacctgatgcctcatttgggaatctctgtgcggtagtttcgacggcggtatcaccgggagcaacggcgacaagtacgaatgatgaggtactggaggaacagttagctgaattagtagctcagttgaggggagaaaaatacaaggtaaagggtgataaaggttgcattgagaaaatctttctaagttttgttggtggtgacaatgccttgtggatggctagctggtccaagtttgggttttatgatgctgattttggctggggaaagccggtttgggtaactactgatctatcagttgtcgagccgaaccagaacctaatttgcatgattgatacaaaatgtggtgaagggatagaagtttcagcaaaatttctggagaatgatatggccaagttcgaatttcacctaagcgagatcctcaaattgttttgatttttgcatcatctatttgtatttccaaaatggactataaaagggactgttagtc

SEQ ID NO: 246 - DNA, 1727 bp, Papaver bracteatum
gttcttcacttgttaatgctataagttaaatgaatacaagtgagttcatcttaccaaagacatcggaattcgttcttgatcaacatcatccatctttctgaaccagtttgtgatcttaaagcagccaaccatgtctaatattattgttgaggtgatctccaaagaaaccattaaaccttcaactccaactccgcatcagtttaaaaaccatagtctctcactcatcgatcaatacattgtccccagtttcgttccactcattttcttcttcccagcagtaccaggtctttacgaccacactgctggcaataagcaacatggtgataatattttgcttcttaagaggtctctttcagaaacattatctcacttttatccgctggcaggtagggtgaaggataatatcgttgttgactgtaacgaccaagggatcgaatttatcgaagccaaagtcagtggtagtatgtctgaatttttgaagaaacctgatgaccatctaagtgggcttcttccctctaaagttgtttgcatgaactatgttacaaatacacaagtgtttgttcaagtgaactcgttcgagtgccattcaacagccatatgtttgtgtgtatcgcacaaggttgccgatgtagctaccatcactacattcattcgctgttgggcacagactaatatctcagttagcagaaccacgtccataggctcaaagttgcatcctacttttgattcggcttctctcttcccacctattaaacaactagtatcgccaacgatggtaacacctacagaactggattcaactcccttggaagaaagtaaatcaatcagtaagatcatcagcaagaggtttgtgttcgacgctaaaatgataaattctgtacgtgaaaaaatatcagcaacaatggtggataaatacaaaagtcgtaggttgtcaagggttgagatagtctccgcattgatatggaagtcattcgttaaattggcaacccctggttcttcatcagtaattgtaagacatgccgtgaaccttagaaggagaatcgacccaccattaccagatgtgtcatttggaaatattttagagttcaccaaactagtagtaggatcagcatcaacaacaacccaagggaccagtaagctgcatgaagacttaaatgaatttgtatgtcaactgagggaatcaataagtaaaatgaacaagggtgatcatgatttcgacatggaaaacactgaaaatgaagggagaaatttgtggatgagtagttggggtagttacggatcgtatgatattgattttggttggggaaaaccaatttgggtaactactgttggacctatgtttgcattctcagatgttttttatatgaacgacacccgttgcggtcaaggaatagaagtgtggggaaatttggttgaagaagacatggataatttccaaaggaacttgtccaagctcctagaaaggatttgaatccatttcattagtgtcgcttattaaggaagtatcccttgcgtgatttttctgttatttctggtgtaacaattatcctgtgacaagttccggtagctaatagatgtccaaatagtttttctttatgttcttgataatctgttaactctgcctagtgtaagaggaggcatcttgtattgttcttctcaggtaatgaaaacatttcttcagtgtatgtctctgctatggtacagagcagaaacaaagtttgatttta

SEQ ID NO: 247 - DNA, 1348 bp, Papaver bracteatum
acaacacttgttttatttcagtctccaaagaggtttgacacagcatatcaaatcaggcaatgttcttgtaaacaacaatcaggaagatatggcaacaatgtctagtgctgctgttgaagtgatctccaaggaaatcattaagccggcaactccacccccatatcaacttacaaacttcaacatctcacttttcgatcagtatatgcctccaagttatactccggtcattctattttaccctgcagccgtcgctgatagtaccggcggtagtaagctccatgatgatcttggcggcttgctcaagaggtctctttctcaaacgctggttcacttttacccaatggctggcaggttgaaagataacatggttgtcgactgcaacgaccaaggggtcgacttttaccaagtgaaaatcaaagctaaaatgtgtgacttcatgatgaaaccagatgagtttcccttaagtctgcttcttccggccgacgtcgtttccgtgaattttgttaaggaggcacaggtgattgttcaggtgaatatgttcgattgtggtggaactgccatttcgttgtgtatatcacacaagattgcagatgcatgcacaatgagtacattcactcgtaattgggcagccaccaccaacacagctcgtcttgggggagctatcggtcctccaaacacaaatccgttgtttcttccttctttcgactcggcatctcttttcccacctaacgaacaattggcatctcaatcagcgatgccatccgttacttatcctactgaggatagccgaagacatatagttgtcagcaaaagatttgtgttcgatgcggtaaagttaaaatctgtacgtgaaaagctacaagtattgatgcatgataaatacagatcccgtaagccaacaagggttgaggtggtttccgctctaatatggaaggcagccatgaaatccgctccgtctggtgcttcatcgacggtaaaccatgccgtgaactttagaaagaaaatggacccacctttacaagatgtgtcattcggaaatctttgtcaggtcgttgcagcattattaccagcaacaacgccggaaacaacagtaaattcagataacaagacagttaatagtacaagtaatgaagtgcaagtggcacttgatgagttaaatgatttcgtagctcaattgagaggcgaaatagataaggtaaagggcgacaaaggttgcatggagagaatgtttctaaatttcatgaatggttacgtaacgaaagacagtgatgttgaagatgaagtgatagctttttggatgactagctggtgcaactttggtttatatgatgctgatttcggttgggga

SEQ ID NO: 248 - DNA, 1572 bp, Papaver somniferum; identical to SEQ ID NO: 5

SEQ ID NO: 249 - DNA, 1919 bp, Sanguinaria canadensis
caatgaacaacaggaaagtaattagtacgagtcaatatcagttcatacaagcatacatacgtaagaattgagtgacatgacatttgattttattgcgggaaaacaaagaggagttcatgagctgctcagtccaacaaagtaacgaaatcaaggagttcctgatcgcgttcgaatctagccatgtcttcctccaacaagcaaatccaggcttcaattccatctcctgttctgtcatccatcaaaagagaggtgttcttgaatggcagactagcaacagctacccaattcggcttcccccaaccgaaatctgcttcatacaccggaaatctacaccagctagtaaacctatatagctccaattcattcccatttgtttccaatgccatcttcataaactcttgaaactttatgaaccctccatcaccttgaagcaccttcaaggaatcgctgttgattttacgtatcgattccctcattggacccagcagatccatctctccagtactctttgttatggatggtgccactcttgcaactgttgtcgcgagattcccaaatgattgctctggcaatggtgggtccagccttctcctcatgtccacaataatgtttgcaatcgatggttttggggaagaagttgctgccatggcagttttccaaataagtgcagtcacagcctccactcgtgtgggcaaattcttcttcttcttcttctcatcattggaattaccatatcttgctcgaagggttgctattttggtgccatcaaacacaaacctccttgtcactctcttttcggcttgtccagcttgtaccttactggtcaaatgcttattaattgcaccagaaaagggtgaggacattccttctctgggtggatacagaatagctgaatcaaaagtcggactgacaattgattcggggattgcctgacgagtgatggaagcccaagtattgataaatgtggtcaatgttgctgcgtcggctagcttatgtgaaatggaaacagaaattgctattccaccacagtcaaacaagttgacttgaacgatcaaatgtgaatcgttaccaacaattacattcaaggtagattggaaatcataaggtaggagatgatgcagttcatctcgtttcataaaatcagaaattttaccgttgactcgagattcgaaatactcaataccttcatcgctacaatccaccaagagcttatctttgatccttcctgctaacgggtagaagagggtcaaggtctccgatagagacttcttgagctgattagatacacctagctgatgatcatcatcaagagtagttgtgggactagagtagaagagaatgatggggacaaaaactggatgagcgagctgatcaagaagagacagcctgaaggttcgaaggtgatcgggggttggagttgcccacaaaatcgaattcaaagaaggccctgctttgcctgttcttgatcaaatgcttgaagatggaaactatcatggatcgtacgatttcatcttcgttgatgctgataaagataattacattaattaccacaagagattaatcgatctagtgaaaattggaggagtgatcgggtacgacaacactctatggaacggctcagttgtggccccaccagatgcaccattgagaaagtacgtaaggtattacaaagactttgtgttggaactcaacaaagctttggctgctgatccaaggatcgagatttgtcaactccctgttggtgatggtatcactctttgccgccgtatcagctaatcatttcccatcacataaaaaatatcccgggaaaatttttattttcccttcgcaaatattttcctttttaatttgtgtcgtgaatgaatgattagggttgcttggttaagtcaatgactcgcacttccacttgtatttttttt

SEQ ID NO: 250 - DNA, 1634 bp, Stylophorum diphyllum
tgtgatgtaattaagaagtccttgacgtaccactaagccagaagatcggaacaccatggaaatgaaggtcgaagtggtgtcgggagagaccattaaaccatcttctcctacttctcaacaccttagaaccttcaacatatcctttcttgatcagattgctccccccatttatattcctctcgttcttttctacacaaccaacggcgatagtgacagtaagtctcgttgtgatgtaattaagaagtccttgtctgagagcttaactagattttatccgttagccggaaagatcaaagatgagggttctgttgactgtaacgatgatggtgttgattatttggaagccaaagtcactaatagtcgactctctcatgttatacaacaccccgatgtccatgcacttcaacaattcctgccatgtgagccctatagttctgatcagtccgcacccaattcgaaagttctcctagccatacaggtcaacgtttttgaggattgtggtggaatggtgatcggtatttgcatctcgcacaggctagctgatgcatcttctttgagcacttttattaacgactggactgcgaccgctcgtggtgctactgagcaaatcaaggctccttatttcaaattgccaactctattccccaaggtagatttaaagggttttactcctccaggaggtatcaagaaaaaccaccgaaaaattgtgacaaagaggtttgtgtttgaggcctccaagatagctgaactcaagaaacaaagtggaaaattagccaatactaatatcaatggcggatctgataaaattcaagagtacccaacccgtgtggaagctttgtcggctttcatttggaagcgtttcatcgaattggatcaagctaaagaaggagctacaacatctgcaagggagtattcgttgacacatgcagtgaatttgaggaaaaagacggttccaccgttgccaacagatgcttttggcaatatgtacagttctacgtttgcagtgctcattgacaccgatggcaagtatgatcatccgtacccaaacttggttggaaaagttagagaggccatagagagaattgatggttttcatgttagaaaactgcaaagtactgatgcatacttcaatttttacaagaaacggatggaaaacgctgtttcgagtggtcagataccaaaagtgttgctacactttagtagttggtgcagattctctatatatgaagcagattttggatggggaaagccaacatgggcaacaactgctccactcccattcgagaatgttgttgtgttcatggacacgagatcaggagacggaatagaagcatgggtgaacatggttaaagaagacatggatgaattcgaatgtgacaaggaactctgctcgtttgtttcttagtttcctagtcgacccaaaaactcgatagtaacttaattctcattcaaacgagtctgatgagaagatctatccatattcaagaatgtatactagctgttaatttcctgctaaagtttttcaaatttcttcgctacaacggtttcttttcctatgttttgatgtccttagttttagaaatattactctgtgattgatatttgaatattgtgttactctgtggttgatattt

SEQ ID NO: 251 - DNA, 665 bp, Stylophorum diphyllum
aacggatggcatcgctgattgagatgccaattgttcgttaggtgagaaaagagatgccgagtcgaaagaaggaagaaacaacggatttgtgtttggaggaccgatagctcccccaagacgagctgtgttggtggtggctgcccaataacgagtgaatgtactcatggtgcatgcatctgcaatcttgtgtgatatacacaaacaaatggctgctccaccgcaatcaaatatgttcacttgaacaatcacctgtgcttccttaacgaagttcatggaaacgactccagatgggagaagcagacttaagcgtacatctggattcatcatgaagtcgcacaaattactcttgatttttacttcgataaagtcgatgccttcatcgttacagtcgactacaatgttgtctttcatcctaccggccagtggataaaattgacccagcgtttcagaaagagaactcttaagcaagttaagatcatcgtggtgtttactaccagaactattagtgactgcagcagggtagaaaagaatgattggaacataaactataggacaatattgatcaagaagggacagattgaagtttctaagttgatatggggttggagttgtgggtttaattgtttccttggagattcacttcgacatcaacactagaacaaagc

SEQ ID NO: 252 - DNA, 1792 bp, Tinospora cordifolia
cgggatcaaatcgaacttattacatcaattttgttcaatttttaggtttagtcaattttgttgaacacccctaattctaaaaatgaaaaaaccgacttcccaaccaaccatatatagatgatatacatagatagtgcaataagaacaaagcactgcaaccattgtttcaaaattgtagttaaagatacttccctgttaaaaggacacaaaggagaggaactcttgatcatgttccaactcatccatgtcttcttccaacatgttcaaccatgcttctattccaccaccacatcttgtgtctatcaaaatgataagattcctaccaagtgtcttggttgtgctaacccaaacaggctttccccacccaaagtctgcttcatagaaagggaacctacaccaactgttgaagttcaacacaagtagctcctcctttgagaagtttttccttgcttcttcaaatgatttcacgaacccttcttctccacattgaagtttccttacataatctccatccattccccttattgcatctctcaaatgctttaccaaggcatggctttctgtttcactctccaagttcacaatttctgttattgcaggtctagaagcattcccaaatctatgatttggagaagcaggcaccatccttcccctcaaattcactgcatgaagtgctgcagatgcccttaaaggtccagctcttgcccgagcagctcttattgcgtgcttccatatgaacgccgaaactgcttctactctagttgggtactcctcctttgagtttttcttagagttattaaaaattatttcacctcttagagcatctatcttcttgccatcaaatacaaaccttctggtgacgatgttgtctaccattcccaccccacttggagctattaatccatttgaatctttcgccgggaagagcgaagacaaatcaaagaacagatttggaatagattcagtggatccattaatagcagtggaagcccaacaatttataaatgtcgccattgatgcaccatcagcaatcttgtgtgaaaagcagaagcctagagcaattccaccgcagtcgaagtaggtggtttggatcgctaggagtgaattggagcacagtgcttcattagtcgtcacataaggatcacacggaaggaatttactgagttcatcaatgttgggtcgtatgagaaaatccgacagtctagtattcttcactctagcttccaagaactcgactcccttgtcgttgcaatcgagggtgacgccgtttactatccttccagccactgggtagaaatgggtcaaggtttctgataaagatttcttgagctgatcggatctctttaagtgttctacttgatttttgtcttcatcagtactgtaaggtggatagaagagaatgatggtgacatagttagaagtagcttgctgatctaaataggagagtttgaaggatttcaggtgatcaggagttggagttgatggtgaaactttgtctcttgagatgatctgaatctccatttctcttgcccataaataaagtcgtgatcattaaaataaagctatagagtgattgagctaatggttggagatcaagcaaccgcaggttcacgtaaattagtaggaacaaaagccgccaagaccacgtaattttcaaaataaataataaataaataaaggcagagaacagggaggaatatgagtaaggtacgaggatggcagcagagaagatcagagagcatttgcagagatggtggaaaggttatcctaatcctctctctctctctctctc

SEQ ID NO: 253 - DNA, 1444 bp, Thalictrum flavum
acaaccaacatccacaatcgtgatcatcaccttttcttcaatactacttacaaattacaacaatacatagaattaatgaacccataatgaacatctaattgagttctaagccagatttggctgaagtgaaggtaatgatgtcaggctcacactcaaaactagccatgtcttcttcaatcaaagaaacccatgcttcaattccattgccacaattagtatccattaacataatgatgttcttagcaaccaagttaacactggttaaccaacttggtttcccccacccaaaatctgcttcatagaaagggaacctacaccaactggtaataacgtaagcttccagttcacctttgacatccatttcaaagaaccttatggtagaatcataaagctcggaaagcccattatcagattgaagttttttaacatagccactgtcaatactccttaacccttttcgtaactgactcaccaaggaatgaaatttttgctgtatatctgtgcttgactctactgacttaccaatcattagatttccaacaaaatcgttagacaaaggtggatccattcttccgcgaagattcactgcaaagtttaccacagatgctgatgaccttagggactttgttctcattcttaccgcattcatggcacatctccatatgagtgctgaaactacctctaccctcgttgggttttcaattgcatctttagttatagctctgagtgccgcaatattagacgcatcaaagataaaccttttactgacaaccttgtgtggacttcctatgggaggcataggagatggtatatctttgggagggaacagagatgtcatgttaaacttgggatggagtagtttactatctccccttgaaagggatgcccaattattgaggaaaacactcatagaagagccatcaagaagtttatgtgatgtacacacagcaagtatcattcctccacaagagaagatattcacttgaatggatagtaatacctttggacccaatccatagaactcatctattcttgggagtaattggtctagctcctgaggtataggattgttcagaacttgcttgagttcaccactaattcgggcttctgaaaagctgacaccctcatcactacaatcaatagcttcatgaccagtgatccttcctgctaatggataaaattgtgttaagacctcagataaggattcctttagacgattagtatgtgcagtattttcgactttgttgtgttcattggcagagtagaatagtaggacaggcacatgaactggaggagcgtattgatctactagagatagttgaaaagttttaaggtgattgggtgttggagaagatggtttaatggtttcttcagagataacctcaacattaagtgtcatcttgttccttatgaatatttctagtagacataaagatggaagctc

SEQ ID NO: 254 - DNA, 1486 bp, Xanthoriza simplicissima
caaatattcaaatgagaacacaaagggcaaaatgacactggatattaacgttctctctcaagaaactatcacaccatcctcttcaacacccaatcacctcagaaacttcaagctctcccttgtagatcagtatgctcctccagtgcatatttctgtcattctattttaccctgccaacatcaatgacagagtaaaaattgatgagcgaactcatcgtttaaaaagatccttgtcggagatcttaactcatttctacccgttaggtggaaagatcaataataatcaatttatcgactgtactgatgagggagtcaacttcttcgaaactcgagttaatggtcgtcaactgagccaagttctcaaccatcctataccagaggagctggagcaattacttaacaaagatgacttctatagattgggtccaaaggcactgttatccattcaagccaacatctttgactgtggaggaatggcacttggtgtttgcatatctcacaaagctgccgatggctcttctttcggattattccttaataactgggccgccatcacaagggaggacaacggaattcctcaaccaatacttggccagacatcgcttttccctcctaaagatgatgtgttctcttatgtacctgccggtgtaagctcaataccaaaggttgttaataaaatatttgtcttcaatgcaggaaatatagctgccctcaaggctaaagcttcccacaaattatatgtagaacaccctacacgggtagaggcagtttctgcactcttatggcggtgtgcaaggaacgcgttaagaacgagacctggatctgcaaactcagcatctgtcgcgactcttgcaatgaatctgcgcgggaacatggttccagcgttgtctaatctctctttcggaaatctcatgattggtacaatagcaacatcaaatacggaaagcgccccagagttgccttgtttggtgggtgagttgcgggaagcgaaaatgaaagttgacgttgattatgtgagaaaacttcaagttgatgatggagtttccgagttatggaattctttcatggatctgaatgcacgacatatcaaaggtgaactggaactttacacaatttccagttggtgcgggtttcctttctatgaagctgatttcggatgggggaagccaatgtggataacctctgttaatctgtttgccccgaatattttcattttaatggatagtaaatgtggcaatggagtagaagcatgtgttaccttggatgaagaagttatggctagattcgaatgtgagcctgagctcattgccttcacttccaccactcgatcagctgcctgaagattgtaatatatagaccatattcattatgtcccatatttacttggtaatgaaatgtagccatattgcgatctctgatgaatttcatggtttatctttgccgatttggcttgctagattattatggtgagaactgaaaacagtcac

SEQ ID NO: 255 - protein, 459 aa, Argemone mexicana
MSDIMKVEVVSREIIKPLSPTPNHLKTFNLSFLDQLSPPIYVPIILFYPIDCKNDCKSTIESIRGNLKKTLAHTLTKYYPLAGRIKDGSFVECNDDGVDYVEANVYDINGGISEIIQNPDGDILKKLLPFDPYGVEGYNTKVLLSIRINVLEENCGGIVIGICISHKIGDGSSLTTFINDWAAAARKNPSEQIKGPQFDLPSLFPLRDLKGYIPPSAGAEMVEEIVTKKFVFEGSKITELKKKGIVNGGNNDDDDVKKYPSRVEAVSAFIWRRVIGLDQAKKQGGDSNNEAPVTVYGSLHAVNMRSRMNPPLPSNSFGNMYTTTMAFSIINNHADEEEKLGHYQLPNLVEKVKESIKKIDSEYVKKVQTTDELLNSMKHLATGHQMVMLSFSSWCRFPIYEADFGWGKPIWVTTSTFPFKNVVVFMDTKSGDGIEAWVNMTKDDMAAFERDQELLQYVS

SEQ ID NO: 256 - protein, 446 aa, Berberis thunbergii
MKMKVQVISRESIKPSSPTPPYLKTFNLCFLDQIAPPFYIPIFLFYADNSPNDIENAGLHCRQKRSLSETLTSFYPLAGRINGNTSVDCNDEGANYVEARVSGLLSEVIVQPNVADVLKMFSPCDEPHFDDADTAHGPKFGSKVLLAIQVNVFDCGGIMICVCLSHKISDAYSMSKFINCWAAKTHNCKEEILPISELSSIFPQRDLLGYIPSAFIHRGKGKIVTKRFVFDASKIASLRATGANSSHVSYPTRIEAVSALIWRRFMESTRAKNGLLKEYVAIHAVNFRRRMDPPLKVEGLENTLGNVFGSTFTASQDLDGKKEPHILVSKLRDAISKIDGKYLRRILCGNAYLESFLGGLAGVAKGETGLAIFSSWCRFPWYETDFGWGKPTWVSISGFPCRDLIILMDTRTGDGIEAWVNMLDEDMAEFEQDEKLLEYVSTTPSA

SEQ ID NO: 257 - protein, 464 aa, Chordyalis celanthifolia
MEGSSPITTASKAGNKLEMADSKSSSVVEVISKETIKPSIPTPEHLKTIKISLLDQLSPPLYVPIILFYTAAAATDDDDKEIYENLEYKSNILKKSLSETLTHFYPLAGRMKDNMVIDCNDEGVDYFEARVSGNMSEFMKPDAVPQFLPYDVSCNYSGNGKIQLGVQVNKFDCGGIAIGVCISHKTADASSMSAFINGWASTARTGATESPTFDLVHLYPPSCVQIPSENSFTTQVEGEKVVTKRFVFDASKIANLRAKLGDDDDDKKTITRVQAVTGLIWKCAMSKWAHTSSSTSSKLSIANLAVNIRWRMDPPLDQLSYGNLLTLATAASTTEGGSLEELVGQLKVALSKIDAETIKYIQGEGGFMRLQELLGRVHEMFAKGDEVEVYMFSSWCRFPVYEADFGWGRPTWVSCSSQPYKNTVILMDTRSGDGIEAWVNLVEDDMTLFQQNQELLEFVSYTDI

SEQ ID NO: 258 - protein, 270 aa, Chelidonium majus
SFDSTSLFPPSEQLASQVSYPTQDSTSVDKLVSKRFVFDAAKITSAREKLQSLMHDKYKCHRPTRVEVVSALIWKSAVKSAPPGSISTVTHAMNFRKKMDPPLQDASFGNLCVVVTAVLPATTATTTNPATKKVSSTSNEEQVALDELSDFVALLRREIDKVKGDKGCMEKIIQKFIYGHDASVAKDSDVEDKVTALFMTSWCKFGFYEADFGWGTPVWVTTVPLIEPKYKNMVFMNDMKCGEGIEVWVNFLEDDMTKFEHHLREILQLF

SEQ ID NO: 259 - protein, 471 aa, Chelidonium majus
MIKMDPKIKVVLISNETIKPSSPTPHHLRNFNFSLIDQFSSPIYIPIILFYDQVIDSNIDDDHRSNRLKRSLSETLTRFYPVAGRINGNVSIDCNDEGVDYFETRIQGKMSDFMVRPELYNHLLPSHIVSNIFATDAQLAVQVNVFDCGGLAICFCMSHKIADASSMTTFINDWAATTRGSMAESVGPIFESASLFPARDILKTSIEPVPDTAGVDVVTKRFVFDASMIAALRAKIQGTTVTSVGKYPTRVEAVSGLIWKSTIEMSKVKLESGSSTKPLKAMVVHHSVNLRKRMDPPLADVSFGNIITLTSAVASSTMIMSQEVELEELVGKLRAAISRINISDYINKMLGCDDDDEEFVRLLKVSNRFAKEVNNDDHVDGEDNTDTDADSNADDDDVYWMSSWCRFPVYESDFGWGKPTFVCTKQSYKNVVILMDTRCGGGIEAWVSLVEDDMAIFERNPNLLQFVSTIN

SEQ ID NO: 260 - protein, 427 aa, Chelidonium majus
MVLKVEIISKETIKPSSPTPIHLRSFKLSFLDQITPPIPFNILFFYPASDGSFDNVKRSDRLKKSLSETLTYFYPLAGTIGDNITVQCDDNGVQFLETQVNCQLSKVLKHPEAQVMKQFLPDPGMMCNELGKGLQLAIQVNMFDCGGMVIGMTVLHKIIDAGSLSTFINAWARTARGTDETLGPRFDSASLFPPNEVPGTTFLPMKMNPNSAEKIVTKKFVFDASNIAALRAKASHSEHVKNPTRVESVSALLWKCAWNAKSKSSVANVIVNFRSRIVPPLPENSFGNLIGMSTTKITNHEEAELHYLARNLRDAIRKINNDYMKELQNDGSLRSTLEAPHEEFNNDEVEVYTMTSWCRFPFYEVDFGWGKPIWISTVNLLVKNGFMLMDTRCGSGIEAWVTLDEQKMAEFESDLDRASQIHFSQNQ

SEQ ID NO: 261 - protein, 434 aa, Cissampelos mucronata
MEVQIISRENISPSTPVDPHRENSLKLSLLDHLATSNYVTIILFYPSGCGVGNHEDHISKRSDQLKTSLSETLTHFYPVAGRIRDGAAVDCDGQGVEFSEAKAGVRLAEFLKRPNIDDLDKLLPCAPYVTNEELPAKALLGVQANYFDCGGMALGVCFSHKIADGAAMATFIRFWADAANGSSKNALPNPSFDLPSLFPAKDSDGATPSGRGGVGEGSNIVTRRFVFKGEKVAALRGTEVEHPTRVEAVSAFIWERAIAATRAKAGPERASIAVHAVNLRGRMVPPLPSNAFGNASRPTITKCVEFGSDTRSDRHVLVKHLRDAMRRVDGDYVRKLQCGEEGFMNSIEEIQKQFSKGEVVAMNFNSWCRFPFYDANFGWGRPIWVSTTKTPGKNLVILIDSKFGDGIEAWLNMVEEDLVELEKDEEFLSFVSNT

SEQ ID NO: 262 - protein, 459 aa, Cocculus trilobus
  misc_feature (249)..(249): Xaa can be any naturally occurring amino acid
MSTLIKKNLSSSFWFQVVELGESVAMDQKSSNGNVFELSVKVGEPTLVPPAEDTPKGLYFLSNLDQNIAVIIRTVYCFKSEEKGNERAGEVLKDALAKVLVHYYPMAGRLTISSEGKLIVHCTGEGGVFVEAEADCKMEDIGDITKPDPVTLGKLVYDIPGAKNILEMPPLVAQITKFKCGGFVLGLCMNHCMFDGLGAMEFVNSWGETARGEPLTVPPFLDRSILKARIPPKIEFTHQEFAEIEDISXTSSLYEEEMLYRSFCFDTQKLEQLKKKAMEDNVIAKCTTFEALSAFVWKARCEALKMKPDQQIKLLFAVDGRPRFEPPLPKGYSGNGIVLTNSLCNAGEVLENPLSFTVGLVQRAVKMVTDSYMRSAIDYFEVTRARPSLAATLLITTWSRLSFHITDFGWGEPILSGPVTLPEKEVILFLSHGKERKSINVLLGLPASSMKIFQELMEI

SEQ ID NO: 263 - protein, 430 aa, Eschscholzia californica
MAVMMDKLVRVISKEIIKPSSSTPSHLSPYKLSLLDQVIYPVYVPVVLFFESNHTNSFESESNYHHLLKKSLSNVLTRYYPLAGRIKDNIFVECNDLGVDYFEAKVNGNITEFRSADLLNQLIPTLDMASRTPLIIQVNMFDCGGIAISMCMSHKLFDASSIATFINCWAATARGETEFVIPNFDAHSLFSVRQVSFPVPDTPVELKDGTIENKLVAKRFVFDAANIASLRARIAKTSNGKYPTRVEAVSALIWKSLMNPEAESMSILNQAVNLRRKMDPPLTQESFGNIVTLATTTLIPKNSYSLDELVGHLRVSIHKIDEDYVRKLRGDSGEEFIKWVTKEAGLMNEDGKNMYMMSSWCRFPFYESDFGWGKPVWVTYSVGQALAKNGIVLMDTRDGEGIEAWVKLEEKDMTAFECNENLLEFAYVTK

SEQ ID NO: 264 - protein, 467 aa, Glaucium flavum
MTYAALPYPLRPCPFTPLDQFSSPHYVPIILFYAAAAPLGDCPTEGNQVDDIDHRSNRLKRSLSETLTQFYPVAGRIKDSSSVDCNDEGIDYYETRIHGKMSAFMTRPREHHHLLPCHIASNILAKDAQLAVQVNVFACGGTAISFCMSHKIADASSMTTFINDWAATNRGSTKTLSPTFKSAFLFPPREILNTLAVPGPDTHGIDNRTIGDVNKAVVTKRFVFDASMIAALRAKIQNTSTPRVGYFPSRVEAVSALIWKSFMEMSKVKKLKIESSSLRKPVKCMVVHHTVSLRKRMDPLLADRSFGNMITLATAVASPTMLMAKQVDVEELVRQLRAAISKINGDYIKKLQSGGDDDEEFLRLVNESGRFAKKVNNGDEVTDHNDDSDDDHEVYWMGSWCRFPLYESDFGWGKPVMVSSYQSYKNVVIMIDTSCGDGIEAWVSLVEDDMAVFERDAQLLEFASTIC

SEQ ID NO: 265 - protein, 449 aa, Glaucium flavum
MKMKVEVVSREMIKPSSPTPHHLRTFNLSFLDQLAPPIYVPLVLFYKSDEYDNDNNSHFPDIIKKSLSASLTRFYPLAGRIQDEGSVDCNDEGVDYLETKVTNGELSQIIQHPEVHVLQQFLPCDSYSTNQSTPVTSKVLLAVQVNVFEDCGGIVIGICISHTLADASSLSTFINDWAACARGATDQIMDPCFELPTLFPKVDLMGYNTLGSIKKNKQQIVTKRFVFEASKITELKKQSVVETNATNINGDGHRECPTRVEALSAFVWKRFMKLNQAKEEASARVYRVTQAVNLRKRMVPQLPTNAFGNMYSPTFALLVDAEGKGDHPYPTLIVKIGEAIKRIDGDHVRKLQHTDAYFNFYKKQMENAASNNQTSNVMLHFSSWCRFGIYEADFGWGKPTWAATAPLPFKNVVVFMDTRSGDGIEAWVNMTKEDMDEFECDKEFLKFAS

SEQ ID NO: 266 - protein, 487 aa, Hydrastis canadensis
MDQTQQFHLLRVTFQKILGKMTLNVEVISRETIKPSSPTPHHLKNFKLSHLDQYTPPIGVPIILFYSANHFEKTKMSDRLKKTLSKTLTDFYPLGGKIKDNNSIDCDDSGVEYLETQVKAQLYQFLNCPEADELNQLIPLNLNCTGMSSEIQLAIQVNVFECGGIAIAACISHKVADASSLCTFLSNWAANARGANHVVFPQFDSAPLFPPREVSSLQLSTEGPTHNVVTKRFIFDSSNIAALKAKSANYVENPTRVEAVATFLWRCFMNVASLKPGSIKSFMVNIAVNLRSRMVPPLPDHSFGNLIMAAMPSSTADSKAELHCLVGQLREAIRRYDGDYMKNLQDGDGVSMFYDSMRQAIELFAKGEMGFYTITSWCRFPFYEIDFGWGKPIWASSLNMVHKNVVILMDTKYGDGIEALVTLDEEDMARFECEEELLAFTSPKNIAYVQELHDFTNPIKMAYEQEVLASTSPNGMAYEKRSLISLG

SEQ ID NO: 267 - protein, 439 aa, Jeffersonia diphylla
MSIQVEIMSRESIKPSTPTPPHLRTFKLGLFDLLAGFDRVSILLFYDNKDTKKIEFSDISRRLKTSLSETLSSFYPIAGRMNGYIAIECNDEGVDYVEARVKAQLEDVIKHRNVDQVLELLSPGDDQEPQLSLKVLLAIQVNLFECGGIVISVCLSHKISDAYSMITFINSWAAKTSDSNQLIHPISQQLSSLYPPSGLDLNSAPFQSTIPNLVTKRFVFDSSNIASLRAEVINNNSSCVPSPTRVELVSALLWRCFMELTRKKNGFLKECAAMHIVDLRKRMDGKGLENALGNLCAPTFTTSRELASENELYVLVGELRDAIRKMDSEFVTKIRRDGEYIQHLEDEYSKGISTGKTGLIMFTSWCRFPLYKANFGWGKPVWATGISARNDFKNVVALMDTRSGDGIEALVRMAEEDMAEFEQDEQLLSFLSSTHCVDC

SEQ ID NO: 268 - protein, 430 aa, Mahonia aquifolium
MIVNIKETTMVRPSEPTPKRSLWNSNVDLVVPRMHTPSVYFYRPNGSSNFFDANVLKEALSKALVPFYPMGARLKRDEDGRIEIDCDGQGVLFVEAETVSVIDDFGDFAPTLELRQLIPTVDYSGDISSYPLLVLQITHFKCGGVSLGVGMQHHVADGASGLHFINTWSDMARGLDLTIPPFIDRTLLRARDPPRPAFEQVEYLPPPAMKTPLSTPTDSTSVAIFKITREQLNILKAKSKEGGNTINYSSYEMLAGHVWRSACKARGLPYDQETKMYIATDGRSRLRPALPPGYFGNVIFTTTPIAVSGDLSAKPLTYAASVIHEALGRMDDEYMRSALDYLELQPDLAALVRGAHSFRCPNIGITSWSRLPIHDADFGWGRPIFMGPGGIAYEGLAFLLPSPINDGSLSLAISLQSEHMKVFEKILYEF

SEQ ID NO: 269 - protein, 457 aa, Menispermum canadense
MKKMMKYMKVQVVSKETIKPSSPTPPHLRTYNFSLIDQHIPQLLYIPFILFYSPNIHHKDHDDDHHRQLINIQTQSLDRLKTSLSETLTLYYPLAGRIKNDSIICCEDEGVEFVHTKVIDSPLLELVNKAEPENLAQLLPRHDHQRNEKPPLLSIQFNAFECGGMAIGLWFSHKVADSSSLCTFLHNWASIARGSLSSTEILCPRFDCATHFPPKQLMSPLQHVKTKGEVVSRRYIFDASMIAALKAKASTTINRNSSSSISPSRVLAVIAFLWRTVIAMDREKQLGSIRPLNMGIAVSLRSKMELTLPELSFGNLVAIGMTSAFHEQEVVERIGDLFGKFNRDYVKKLQSGEEYLKLMESLGELEEQICRGEAERYGVTSWCRFPFYEVDFGWGKPVWANVAAFEDNNFFVLMDTRFGEGIEVWVSLGEDDMARFQRQLDRELLVLFNSFSSVGSA

SEQ ID NO: 270 - protein, 444 aa, Nandina domestica
MKVEKISRDFIKPSTPTPDHLRTFRLSLLDQLAHPVFVPIILFYSSPTTTLDDDHQLGVSNQLKKSLSETLTLFYPLAGRIKDKLLVDCSDEGIEYFESRVNGKISDFMKRDELHHLLPYDFQSTLNVIVGNDSHLIVQVNLFDCGGIAISVSISHKLADAATLTTFINTWASITRQAIPESIVSPTFDSAILYPPREGMSSPFSGAINKHLTSKVQAGQAEKRVTRRFVFDGTKIATLRARYGNSNDEKKKKKNLPTRVEAVTALIWKTAMAATSSPKPSIANIIVDMRRRLDPPLPEQSFGNLATTVARVAPSITKSTGEMDLLGPMRESIRKINSDSLKVLQGDGGFIKFQEFMKMALETNGNELELYRFTSWCRFPVYEADFGWGKPNWVAVASLPFKNTSLLMDDRTGDGIEAWICLLEEDMARFERDQELLDFVTLLD

SEQ ID NO: 271 - protein, 422 aa, Nigella sativa
MTPKVSVLSRETIKPSLPTPPHLRTFRLSLLDQYSFPVRVPVILFYFNDGENDHTKISKLKTSLSDILTHFYPLAGRIVGDRLINCDDSGVQYLEAQANTQLETFLKYPKADELNQLLPLKLHHNDESSETQLQIQVNTFECGGIAIAASISHMVADTATLCSFINTWAAKSCGCSKTMPPCFDSVALFPPKEIPSFQLPMGDQTQRVISKRFVFHSAKLAALRAKSVSKLEVENPTRVEVVSALVWKCLMNAATRRQGMSFTVNMAVNLRSRMVPPLSDNSFGNLIIGALPSAERGEALHCLVGKFRKMIKRDYSKLPENNGISIFHDGLRKTMEAAARGKIGMYTITSWCRFPFYEADFGWGKPIWATTVNVDHKNIVMLMDTKDGDGIEALVTLDERDMALFECQQELLDFAIPNSMVS

SEQ ID NO: 272 - protein, 482 aa, Papaver bracteatum
MILYSWDYMEALSSVDVEVISKETIKPTTPTPYQLRNFNLSLLDQYCPIVYVPIILFYPAAVTNSSGSKHHDDLNLLKSSLSETLGQFYPLAGRMKDNIVVDCNDEGIDFIEVKIKSKLCDFMMNPDVRLSLLLPSGVVSMNFVKEAQVIVQVNIFDCGGAAICLCISHKIADACTMSTFTRYWAATTNTARLGGAIGPPNTNPLFLPSFDSASLFPPNEQLASQSAMPSVTYPTEDSRRHIVVSKRFVFDAVKLKSVREKLQVLMHDKYRSRKPTRVEVVSALIWKAAMKSAPSGASSTVNHAVNFRKKMDPPLQDVSFGNLCQVVAALLPATTPETTENSDNKTVNSTSNEVQVALDELNDFVAQLRGEIDKVKGDKSCMERMFLNFMNGYDASETKDSDVEDEVIAFWMTSWCNFGLYDADFGWGKPIWVTTDPFIEPNKNIIYMIDTKCGEGIEVWVNFLEDDMAKFEHHLSEILELF

SEQ ID NO: 273 - protein, 526 aa, Papaver bracteatum
MILYSWDYMEALSSVDVEVISKETIKPTTPTPYQLRNFNLSLLDQYCPIVYVPIILFYPAAVTNSSGSKHHDDLNLLKSSLSETLGQFYPLAGRMKDNIVVDCNDEGIDFIEVKIKSKLCDFMMNPDVRLSLLLPSGVVSMNFVKEAQVIVQVNIFDCGGTAISVSISHKIADAATMSTFTRYWAATTNTARLGGAIGPPNTNPLFLPSFDSASLFPPNEQLASQSAMPSVTYPTEDSRRHIVVSKRFVFDAVKLKSVREKLQVLMHDKYRSRKPTRVEVVSALIWKAAMKSAPSGASSTVNHAVNFRKKMDPPLQDVSFGNLCQVVAALLPATTPGASPTVNHAVNLRKKMDPPLQDESFGNLCKAVTAILPATTTTTTTKNEDNKTINSTSNEVQVAVLHELNDFIAQLRSEIDKVKGDKDCMEKIIQNFMNGYEYATTKKKNDVEDEVITLWMTSWCNMGLYETDFGWGKPIWVTTDPNIKPNKNIIYMNDTKCGEGIEVWANFLEDDMAKFEHHLSEILELF

SEQ ID NO: 274 - protein, 516 aa, Papaver bracteatum
MILYSWDYMEALSSVDVEVISKETIKPTTPTPYQLRNFNLSLLDQYCPIVYVPIILFYPAAVTNSSGSKHHDDLNLLKSSLSETLGQFYPLAGRMKDNIVVDCNDEGIDFIEVKIKSKLCDFMMNPDVRLSLLLPSGVVSMNFVKEAQVIVQVNIFDCGGAAICLCISHKIADACTMSTFTRYWAATTNTARLGGAIGPPNTNPLFLPSFDSASLFPPNEQLASQSAMPSVTYPTEDSRRHIVVSKRFVFDAVKLKSVRDLLPSFDAATLFPPSEQLVCPSEVPPTPVSHHNDDSGGEKSVSKRFVLDAVKINSVREKLQGLMHDNYKCTSRPTRVDVVTALVWKAAMKSAPRDGFLPMVNHVMSFRKKMDPPLPDASFGNLCAVVSTAVSPGATATSTNDEVLEEQLAELVAQLRGEKYKVKGDKGCIEKIFLSFVGGDNALWMASWSKFGFYDADFGWGKPVWVTTDLSVVEPNQNLICMIDTKCGEGIEVSAKFLENDMAKFEFHLSEILKLF

SEQ ID NO: 275 - protein, 457 aa, Papaver bracteatum
MNQFVILKQPTMSNIIVEVISKETIKPSTPTPHQFKNHSLSLIDQYIVPSFVPLIFFFPAVPGLYDHTAGNKQHGDNILLLKRSLSETLSHFYPLAGRVKDNIVVDCNDQGIEFIEAKVSGSMSEFLKKPDDHLSGLLPSKVVCMNYVTNTQVFVQVNSFECHSTAICLCVSHKVADVATITTFIRCWAQTNISVSRTTSIGSKLHPTFDSASLFPPIKQLVSPTMVTPTELDSTPLEESKSISKIISKRFVFDAKMINSVREKISATMVDKYKSRRLSRVEIVSALIWKSFVKLATPGSSSVIVRHAVNLRRRIDPPLPDVSFGNILEFTKLVVGSASTTTQGTSKLHEDLNEFVCQLRESISKMNKGDHDFDMENTENEGRNLWMSSWGSYGSYDIDFGWGKPIWVTTVGPMFAFSDVFYMNDTRCGQGIEVWGNLVEEDMDNFQRNLSKLLERI

SEQ ID NO: 276 - protein, 447 aa, Papaver bracteatum
MFYFSLQRGLTQHIKSGNVLVNNNQEDMATMSSAAVEVISKEIIKPATPPPYQLTNFNISLFDQYMPPSYTPVILFYPAAVADSTGGSKLHDDLGGLLKRSLSQTLVHFYPMAGRLKDNMVVDCNDQGVDFYQVKIKAKMCDFMMKPDEFPLSLLLPADVVSVNFVKEAQVIVQVNMFDCGGTAISLCISHKIADACTMSTFTRNWAATTNTARLGGAIGPPNTNPLFLPSFDSASLFPPNEQLASQSAMPSVTYPTEDSRRHIVVSKRFVFDAVKLKSVREKLQVLMHDKYRSRKPTRVEVVSALIWKAAMKSAPSGASSTVNHAVNFRKKMDPPLQDVSFGNLCQVVAALLPATTPETTVNSDNKTVNSTSNEVQVALDELNDFVAQLRGEIDKVKGDKGCMERMFLNFMNGYVTKDSDVEDEVIAFWMTSWCNFGLYDADFGWG

SEQ ID NO: 277 - protein, 437 aa, Sanguinaria canadensis
MNSILWATPTPDHLRTFRLSLLDQLAHPVFVPIILFYSSPTTTLDDDHQLGVSNQLKKSLSETLTLFYPLAGRIKDKLLVDCSDEGIEYFESRVNGKISDFMKRDELHHLLPYDFQSTLNVIVGNDSHLIVQVNLFDCGGIAISVSISHKLADAATLTTFINTWASITRQAIPESIVSPTFDSAILYPPREGMSSPFSGAINKHLTSKVQAGQAEKRVTRRFVFDGTKIATLRARYGNSNDEKKKKKNLPTRVEAVTALIWKTAMAATSSPKPSIANIIVDMRRRLDPPLPEQSFGNLATTVARVAPSITKSTGEMDLLGPMRESIRKINSDSLKVLQGDGGFIKFQEFMKMALETNGNELELYRFTSWCRFPVYEADFGWGKPNWVAVASLPFKNTSLLMDDRTGDGIEAWICLLEEDMARFERDQELLDFVTLLD

SEQ ID NO: 278 - protein, 441 aa, Tinospora cordifolia
MEIQIISRDKVSPSTPTPDHLKSFKLSYLDQQATSNYVTIILFYPPYSTDEDKNQVEHLKRSDQLKKSLSETLTHFYPVAGRIVNGVTLDCNDKGVEFLEARVKNTRLSDFLIRPNIDELSKFLPCDPYVTTNEALCSNSLLAIQTTYFDCGGIALGFCFSHKIADGASMATFINCWASTAINGSTESIPNLFFDLSSLFPAKDSNGLIAPSGVGMVDNIVTRRFVFDGKKIDALRGEIIFNNSKKNSKEEYPTRVEAVSAFIWKHAIRAARARAGPLRASAALHAVNLRGRMVPASPNHRFGNASRPAITEIVNLESETESHALVKHLRDAIRGMDGDYVRKLQCGEEGFVKSFEEARKNFSKEELLVLNFNSWCRFPFYEADFGWGKPVWVSTTKTLGRNLIILIDTRCGGGIEAWLNMLEEDMDELEHDQEFLSFVSF

SEQ ID NO: 279 - protein, 449 aa, Thalictrum flavum
ELPSLCLLEIFIRNKMTLNVEVISEETIKPSSPTPNHLKTFQLSLVDQYAPPVHVPVLLFYSANEHNKVENTAHTNRLKESLSEVLTQFYPLAGRITGHEAIDCSDEGVSFSEARISGELKQVLNNPIPQELDQLLPRIDEFYGLGPKVLLSIQVNIFSCGGMILAVCTSHKLLDGSSMSVFLNNWASLSRGDSKLLHPKFNMTSLFPPKDIPSPMPPIGSPHKVVSKRFIFDASNIAALRAITKDAIENPTRVEVVSALIWRCAMNAVRMRTKSLRSSASVVNFAVNLRGRMDPPLSNDFVGNLMIGKSVESSTDIQQKFHSLVSQLRKGLRSIDSGYVKKLQSDNGLSELYDSTIRFFEMDVKGELEAYVITSWCRFPFYEADFGWGKPSWLTSVNLVAKNIIMLMDTNCGNGIEAWVSLIEEDMASFECEPDIITFTSAKSGLELN

SEQ ID NO: 280 - protein, 435 aa, Xanthoriza simplicissima
MTLDINVLSQETITPSSSTPNHLRNFKLSLVDQYAPPVHISVILFYPANINDRVKIDERTHRLKRSLSEILTHFYPLGGKINNNQFIDCTDEGVNFFETRVNGRQLSQVLNHPIPEELEQLLNKDDFYRLGPKALLSIQANIFDCGGMALGVCISHKAADGSSFGLFLNNWAAITREDNGIPQPILGQTSLFPPKDDVFSYVPAGVSSIPKVVNKIFVFNAGNIAALKAKASHKLYVEHPTRVEAVSALLWRCARNALRTRPGSANSASVATLAMNLRGNMVPALSNLSFGNLMIGTIATSNTESAPELPCLVGELREAKMKVDVDYVRKLQVDDGVSELWNSFMDLNARHIKGELELYTISSWCGFPFYEADFGWGKPMWITSVNLFAPNIFILMDSKCGNGVEACVTLDEEVMARFECEPELIAFTSTTRSAA

SEQ ID NO: 281 - DNA, 1150 bp, Argemone mexicana
acttcaaaatatgaatattcatcgatcaaacaaaaaccctaaagtttaatggcagaaaataattcttccattattactacaaatgtaactaatccctacgaatatctcaagatcgttcacaactcagaagacgatacactcactcggctcgatcctgtcccaattacaaacccaataacaaacgttcaaaactgcaaagatattcctctcaacattcaacacaaaacctggattagactcttcaaaccacctcaattacaacaacaaaaatcttcgaagaaagacgatgaattttctaaatcgttatcaaataaccaaagttttcctctaataatttacttccatggaggtgggtttataatgaatagtgcagcctcaaattatgaacatgttttttgtgaatttgtgacgactcgtatacccgcttttatcgcttcagttgaatatcgtcttgctccggaaaaccgactcccagcggcttatgatgatgcagttgaagccctaaattgggttaaaaaccaagccttggatacgattaatggtgagcaatggttgagaaattttgttgatttttctaaatgtttcattatggggtgtagcgcaggtggaaatattgcttatcatgcttgtttaagaacattagaattggatttggaaccaataaagatttctggtttcatattgaaccaaccttattttggtgggttaaggagaactgaatcagaattgagattgattaacaattggatgttgccgttagttatcaatgatttgatgtgggaattaagtttaccgattggtgcgaatcgagatcatgtttattgtaatccaatggttgatattgataattcatcatcaacaatattaggattagttaaaaaattagggttaataaggatgaagtgtttggttatagggtgtgatggagatccattgattgatcgtcagattgaatttgtgaagttgttgaaagagaaaggtgtaatggttgagagttgcattgaagaaggaggttttcatggggtgggtttttcttgtcctgaaaaaactgatgaattgtgtgtaaaattaaaagattttattttaggtacctattaatgtttgtatcagctcaaatctcaatcattgatttgaatctaaaattattttc

SEQ ID NO: 282 - DNA, 1089 bp, Berberis thunbergii
tatcattagcataaagcattccaaaagtaggaaatataatcacataatgatcctcttattcactcaatagacactttttatataaaaactggaaactcacagcggtcttactcagtagcttcagaggagtagacaaaatctatcaaggcagcaaacaatacctcagctttctgtggttcatacagttcaataccatggtacccttctttttcattgtcatcaaaccaacgcacaacatgcacacctttcctctccaacatcctcacaaactccatctgatgatccatcagtgggtccccactacgcacactcacaaaacaacgcttaattaatccattcttcttgtcatcatcaccatggatcattggattgcagtacttgtgatcacgatcaacccttcttggcaaagccaactcccacatcatatcactcattgataatggcaagatcttatcatcgaccaacctcagctctgatttagtcctttgagtcccaccaaaaaatggttgatttaatacgagccctctgatcttcaggggctcaatatccaaatctaatgcctgcagacctgcatggtacacaatgtttcccccagaactacatcccatcagaaaacatttggaaaagtcgccaaactccctcaacaatggctcaccatttaaattcaaagcttgatctctcacccaattaatagcttgcactgcatcattgtaggctgcagggagtcgactttcgggtgctagacggtactcaacagagagaataaaagcaggtagtttattagctaaggatgtacagaagtcatgaaaaatggtttgggctgcactgcacaaaatgaatccacctccatgaaaataaagtataattgggagcttatcaccattagtaattcgtggtgattcaatgggtttgaaaagcctcaaccaagttttatgagcagtgtttaggggtatgtcttggatgatagattgatcatcctcatatctacaagtaggggatatgagtctagtgagtgtatcgtccgaattgtgaacaaggccgagaaggttgtaagggtttatgggtgtttgggactgagattgatctaca

SEQ ID NO: 283 - DNA, 965 bp, Chelidonium majus
cgacttataaaagagagcagaaagaaagcaaaaaaaatgaaaaatccggtaaaacgaaaaattacatcagctagttcgtacacaatgtttcgtccaaaagctcattttagaaaaaataagaatttcattgtttaatactaataatatattttagtatataaattcgtcgtttaaaataaaatgttttagtttttccaaaaaggtttcacgtatcatagggtcaaagcatagcaccccatgataccctccttgttcaatccaagtttcaaccttcacacctttttcctccagcatcttcaccagctgaatttgtcgatcaataagtggatccccataaaatcctaccacaaaacatctctcgattaaccccaccatatttccagatgatgatccatcatgatcaatattcggattacaataaacgtgatcacgagtagacccaagcggcaacgccagttcccacatgacatcccttacggcaagcggcaagtcctgattgttgatcacttttgaatctgattcagttctctcaagactaccaaaaaaagggcagtgtaatattaatccattaatcttagctggttcaagatccatttctattgctcttaaactggcatgatatgcaacattagcacctgagctgcaccccataatgaaacactttgagaagtcaccatactcttttaaccatacttcactattatttagtttgcctaaaccttggtctttgacccagtttaaagcatcaacagcatcatcataggcagcgggaagtcggttttcaggagcaagacggtagtctacagaaacgaccagcgcgggtatatgtgtagcaatcgattgacaaaagtcatggttcatagttgaatctgcattgaaaagaatgaaacctccaccatggaaataaattatgataggaagcagcttattctttgttacaggaggttctttggttggtggccgaa

SEQ ID NO: 284 - DNA, 1420 bp, Cissampelos mucronata
gaaacatcaaaggcatcaaggatgccacgtgttctcagctcaagctcataataaaagccgcggccacctcgcaaaacggacgcgacgggcgcacacccaaacacacatcgccacatccgcctacaagttggccgtgccttcctcgagatgcgtttcgtagctctcggcgtaaaagacgcgactcgaggtgtgccagtccgcatcagtggtgtccgcagagcatttctgttccattaaagtaggtctctggcgtagctatgcatcaccatagtgggtggactggatgatgacaataaatgctgaactcattcgattccgatcgccaaccaacacagcccaaatcgaaacccaaattcgctctccaattctccatcaatggatccctacaagttcctcagcatctctcccaacccagacggatccctcactcgccacacccgaatccccacttccccgcccaccaacaatccaacagtggcctctgcagatttccctctcaacccctcgaacaacacatggttcagactctacaagcccacaaacacccccaccagcgcaaaggtcccgatcgtgatttactttcacgaaggggggtttgtgctgttcagcgcggcgtcgcagcccttccacgactgctgcgccgccttggcgtcccaattgcaagccctagtcatgtccgtggagtaccgcctcgcgcccgagcaccgcctcccctgcgcctacgacgacgccattgatgcgattgcgtgggtcagagggcaagccctcggcgggggcaatggttggtttggggattcggttgatttctcgaggtgtttcttgatgggtagcagctctggtggcaacattgtttacaaggcggggttgatgtcattggagaagggactaattggtggtggtgctgagcatgtgaagctagtaggactaattatgaaccagcccttctttggtggggtggagaggactgattcggagctccgctacgccgacgaccggatattgccgctgcccgcgggtgatctgttgtgggaattggctttgccgacagggtctgatcgggatcatgagttttgcaatccattaaagggtgttagtggtgagattgagaggctgcctaggtgctttgtcaatgggtattgtagggaccctttgattgataggcagagacagtttgcaaagatgttggagaggaatggagtttcagtggttgagcggtttgtcgatgatgggtttcatgcttgtgagctttttgatcctgataaagctagggctttggctttggcaatcaaggatttcatttatgattgtggtgctggtggtgcaaaatcagctctgtaatgttgtggaagaaagtatatataattatagttttattggtaattagtcggcatcccaagcttggcccgtgggcaagactata

SEQ ID NO: 285 - DNA, 1381 bp, Cissampelos mucronata
tctctctctctctctctctttttccctctatataaggagcttattggattccacatttgcaccactagagctcacaaaaattacctaagaaaacactgctactagtacttttctctccacatacttccaccaatattgtatgagaaacaaaagaatggctgctctctcctttgacaatgcaagattaggtcaccaagttggccaagatcatcgccaaaagccaggagttctaatcgaagagatcgatggcctaattcgagtttacaaagacggccacgtagagcgccctccggtcgttccaaacgttgattgtatagcgtatatcgagtcgagtttgacgtgtagagacgtaattatcgataagttcaccaatgtttgggcaaggttctatgttcctagaacccaagggacaaagcttcccttccttgtgtacttccatggtggtggcttctgcgttggctccgccgcttggagttgctaccatgaattcctaacaaaagtagcaaccaaagctggttgtgttatcatgtcggtgaattaccgcctttcgcctgagcaccgccttccgacggcctatgaagacggcgtcggcgccctcatgtgggtgagaagagagattcttagagggtctagtgaacaaaaatggtggtggagccattgcaacttctcacaagtgttcatagttggtgatagtgctggtgccaatatagctcaccatgtgaccacaagggtagggcaacttggggcttcatctgatgaacccaacattttgagccctatgactctcaagggcaccattttgattcaaccattttttgggggtgaagcaagaacgcattcagagaaatacatggcgcagcctcctaagtcagccctaaccgtggcggcatccgatgtttattggcggttgtcgctgcccttaggcgcgagccgcgatcatcgatggtgtaatcccattgcaaagggtgctatggatttggaagagttgagggtgcctccaattatggtttgcatatcagagttggacatattgaaggataggaacttggagttttgcagtgctatgaaaagggcagggaagagagtggagcatgtcgtgtacatgggtgtgggacatgcatttcaagtactaaaccactctcagctctctcaagcaagagctcatgagatgatgtctcacatcaaggctttcatcaaccgataatatatatattgttagtttttgtgttgattagttagtgtatagtaattagtatgagtacttcagtataaatatattgatcaagttcgttatatttggattgaaaattttgtgggaacgactagtatttttataatgtgttccccttgttttttcctttacaatttgctcaaaagaatt

SEQ ID NO: 286 - DNA, 1862 bp, Cocculus trilobus
aacgaataatataactaatgatattgtgtttacagagagtaagttagagagagacagagagaggattggaggatttttagagttttggtttggttagtggagaatgatgagaagttgtggagatgggagttttggggaagatcaatattgggttgttttagggtggttttttattttgttttgtgagtttgttctgtttttggaggtgattgaagcttaatggccggaagtaacgcggttaatgagtctcagagagcggttccactcaacacttggattctcatctccaattttaaagtggcatacaatcttcttcgtcgcccagacggcacttttaataggcacttggctgagtttcttgatcggaaagtgcctgctaatgtaatcccagttgaaggagttttctcctttgattgcttcatcgacagagctaccggccttcttagcagaatatatcggccagccccagctgatgaagctgaaattcttccgggcgtcattgatctcgaacgccctttaagcactgaggttgttccagtcattatcttctttcatggaggaagctttgcccactcctctgccaacagcgctatctatgataccctttgcaggcgccttgtgaggaattgcaaggctgttgtggtctctgtaaattatcgtagggcgcctgagaatcgctatccttgcgcctatgatgatgggtgggcagctctcaagtgggttcattcgaggccatggcttcggagtggagaggactccaaagttcatgtttacttggcgggtgatagctcagggggcaacattgcccaccatgtcgcaatgagggcagtggaagcaggaacagaagtaatgggtaatatactattgaatcctatgtttggtggaatggatagaacggaatcagagaagagattggatgggcggtactttgttacaattcaggaccgagattggtattggagggcttttctccccgaagggacggaccgagaccatcctgcgtgtaatccgtttggtcctaaaggcgcagacctcaaaggtgtcaagtttccaaagagccttgttgtggtggctggtctggaccttgttcaggactggcaattggcttatgttgaagggcttgagaaggctgaacaagaggtgaaactaatttatctggaaagggctacaattgggttctacttgttgcctaacaatgatcacttctacagcgtcatgaacgagataaacaagtttgtcaattctaactgttaatagacttactcttacatatgatacaggcagagagatacataacagaagcttgacatttcactcggggttattttttcctcctctttcgggttgatatcgtgtgcagtgtataagagtgtgtagtactactatgtggttgtgtcgtcgtctattatggtggaatgaggtctgcatctctgcccgactgggttcttcattctagagatgttggtttcagtttcctggttgcagagttgtgctatctttaggggacttggttcaattggttcagttggatcagaattcattcactgatgtatgtaatgtgagaacatatactggctgaacttggggctcacctggttcaatgaagctgttactgaccaccggagctgtttgacaacaggtctttttagcgcaccaaacttaggttaccctgacttctcactgcgaaaaggggaaggcaagaggagtgcggtaacgttgtggtggttattacaatcgatgcattgctaatgttacaagaactaattcagaacatggattaggaaacatccatggtattgtgacttgtatgctatacttgtcttactagaattattacataaagatgtttgcccttttaactg

SEQ ID NO: 287 - DNA, 1482 bp, Eschscholzia californica
ccacaacttctcattctaacaacttatttcaaaatcatcatcaaactcaaatatttcttcaatctttcttctttatcaacaatggaagataaatcttcatcacttatatccaatattaatccatatgaagcactacaacttgtttacgacgcacaagccgattctctcacatgtaatcttcctgttccaactatcgaatcgtcgggcgatccgaattgtaaggatatacctctcaacattgagaaaaagacatgggttcgaatttttagacccacaaccatcaccacccccacaaccaccagtgttaccactgcaacaaccaccacaaataagcttccaatcataatctactttcatggtggtgggttcatcctgtttagtgcagcctcaggtatgttccatgatttctgcaaatccatggctgcccaagtacaagctttagttgtctcagtagagtaccgcctagcacccgaaaagcgtcttccggcagcttatgatgatgcaacagatgccataaattgggttaggaatcaagccatggatcctgttaatggtgagccatggttgagagactatgctgatttctcgaagtgttttctaatgggttgtagtgctggtgctaatatttcataccatgttggtttaaaagcatgtgaattggatttggaaccaataaagatttctgggttgatactgaaccaacccttttttggtggatcaaagaggacagaatcagagattagactgagggatgatcagattttgtctaacccagtgattgatttgatgtggaaattgagtttgccaattggggtagatcaagatcatgtatatagtaatccaatggctaataatggtgggggaaatgttaaagtgataaagaggatatttgtgaatggatgtgatggagatccattatttgatcgtcaagttgagtttgtgaagatgttggaagacaagggtttaaaggttgaagcttccatggaagaaggtgggtttcatgggatgactttccttgatcccaaacaaactgattttttctgcaaaaagttgaaggatttcattttcctctcacaagttgtttaatggagattgcaacaaaaaacaaatgttgtttaatggaaagtggagcaagatcaaagggtatgtgttgattaatgtttttgtttgattaattgtaggaaaatgaattggggactccctaggacatactcccaagtatactccctctcacaagacaagatcattttagttttttcaatctgataaaaattgcgaaaagaccaaaatgacattgtcattgtgagggggagtacgcctgggagtatgcccagagagtccccctatcatcattgattgtcttataccttataaccactatgactaacataaagggtcacgtggaattgggtgaagagtcatgtaaccataaaattcttaatgacgatgttggatttgtccgccaataattagcttacgacg

SEQ ID NO: 288 - DNA, 1170 bp, Glaucium flavum
actccacccacccaaccacaaattcattttaaatctccacatgcaatcatcaagccctcaaataaaaaataccaataagactagaaagaaccccaacccaacaatggcggatcaaccacccaccacaattaatccttatgaagctctcaaaatcgttcacaatccagatgacacactcactcgtaacctccccattccagataccccttcttcagatgatccaaattgcaaagacacctctctcaaccctcaacacaaaacctggatcagaatcttcagacccactaaaacccaatctcaagataatgatttttctataacaaataagcttcctatcatagtttacttccatggtggtggattcatcctctgcagtgcattctccactatcttccatgatttctgcaaaaatatggcaacccaattaccagctttggtactctctgtggagtatcgtctcgcacccgaaagccgtctccccgccgcctacgacgacgcggtcgacgctttaaattgggttcggaaccaagctttagagactgctaatggcgaggaatggttgagggattatgcagatttctcaaactgtttcattatggggtgtagtgcaggtgggaacattgcatatcatactggtacaagagcattagaattggatctggaaccaattaagatttctgggctgatactgaaccagccttattttggtggagtagagaggactggatcggagttaagattgattaatgataaggcgttaccgcttgcaatgaatgatatgatgtgggaattgggattgccaattggggctgatcgagatcatttttattgtaatccgatggttaagattgatggtgagagtgggactagagatgaaggaaagcttgggttgaggatgataaggtgtttgacgattgcgggttatgatgacccgttgtttgaccgacagattgaacttgggaagatgttggaagggaaaggagtgaaggttgtgaggtttattgataaagaaggatatcatggaatggtgcattttgatcagaaaaaagccgaagaaatgtttgtagcagtgaaagattttatttcctctactaattaatgtgaaattggccttgttaaatgttaatggtggagccttgtgtttgaggacattttttttttttttttttt

SEQ ID NO: 289 - DNA, 1391 bp, Hydrastis canadensis
gattcttctagagttgaatgggctgaaaccccccaaatttgtctataaatagatctattgtatcctcacaaaccaattcacccattccattgattgatcagttattctccattctctaattccataaacaaataattttagtccatttttaacatggctgatcaaaattcatccgttgaacccatcgatccttacaaatttcttaatatcatttacaatccctccgatgacacactcactagaaacaaccacttcccatctacccctattacacctgatgtcaaaaacgccaaagacatctctcttaacactactaagaaaacatgggtaagactctttagacccaatgaaccatctcttaatagaaagcttcctattatagtttatagtcacggtggtggtttcattcttcagagtgcttcagatactgtgtttcacaacttttgtgcttctatggcaaatatattacctgccttagttgtttcaattgagtatcgtttagcacctgaaagtagacttccaggagcttatgaagatacaattgaagctataaattgggttaaaaaccaagcattagatatgaatggtgagcaatggttaaaagattttgctgatttttctaattgctatctcatggggagtagtgcaggtggcaacattgtgtaccatgcaggtttacgtgcgttatcattggatcttgaccctttgataatcaaaggattcatattaaattcacctttttttggtgggtccaaaaggactgaatcagaattgagattgataaatgatacgcttcttcctttagctgtgaatgatttgatgtgggagttgtcgttgccgaaagggtgtgatcgcggtcacgagtattgtaatccaatggttgatagtagttataaacaaaacattgggttgattgagaagtgttttgtgagtgtgggtggtgaggaccctttgatggaccgtgagatggaatttgtgaaaatgttgaaggagaaaggtgtgaaggttgtagtttggtttgataaggaaggattgcatgggatggaaattacagttccaggtaaagatcaagctttatttgtgctccttaaaagttttgtttattaagaaatgagaagatctttaggaactttgataccattcttgcgatcaaggcagcttgcctatggttttggtcctcttatgggaatacacatgaggggagaaggtttgatgatattgtagtgtattgagtggtgtgtgtttgtttttttttgtacatatattgagtggtgtgctttaattatttctctttgtttcctttcccatttatttgggatacttgtaataatggttcattgtcttcttcaagattattaatctgttcttcaagataatcaatctcagcccta

SEQ ID NO: 290 - DNA, 1229 bp, Hydrastis canadensis
agaaaattcaacaattttctctttttcttctcctctataaaaccatcaaatcacacaaaccagctcaatccacaatcattcacatcaaaatcaaatggcaaacccaaacccagtcaccatagatccatttaaacaactcattatcactctcaacccagatggtactctcactagacccactttagttccaattgttccaccaacaggtgaaatcaattcccattcaaaaaccccatcagttatttccatggatgtccctctaaatccttcaaaaaacacttggattagagtctttcaaccttctaatctttcttcaaattcaaaacaccctctcataatttactttcatgggggtggttttgttctttatagtgcagcatctaaaccatttcatgaatcttgttgtcaaatggctagtgaattatctgctgtgattctatcaattgaatatcttcttgctcctgaaaataaattaccctcagcttatgaagatgcagaggatgcaatgctttgggtgaagaaacaagctttgaattgtgagtataaattttgtgaatttgtagatttctctaagtgttttattatgggtagtagttctggtggtaatataacttatcaagcaggtttcagagccttgaaattagatctagaaccaattacaatcaatggggttatcatgaatcaaccattctttggtggggttgaaagaactgaatctgagttaagattgattaatgatagaattttgcctttaccaacatgtgatttgatgtgggaatttgctttgcctattggttctaatagagatcatgagtattgtaaccccattgggtcccaccataatgaaatcaaatggttaccaaggtgttatgttagagggtatggtggggacccattgattgatagacagatgaagtttgtgaaaatgttagaagatcatggagcttgtgttgtgaaacattttcttgatgatggttttcatgcttgtgagttatttgatcctaagatggctgaagctttgtatgtagatcttagagatttcatttactcttctgagtcaaatgctgttgtcaagtcaaagtattgagttgaagagatattagaaattaattagtaatttggtttggtatcatatttgattgtgactcgggagatgggatatggtttagtattgtttgtgatgctaataaaatatgagtactttgttatctctttttcaaattttttta

SEQ ID NO: 291 - DNA, 1401 bp, Hydrastis canadensis
aagccttaaacaattcaattgtgtgaattggacaaattgggaattagagatgcgaaaatgtgtagggctgagattgattatcttgaagaacagattaataatcttgaagaagacaatgaaccattattacaagtatcccaaataaatgggaaaggaaacaaagagaaataattaaagcacaccactcaatatatgtacaaaaaaaaacaaacacacaccactcaatacactacaatatcatcaaaccttctcccctcatgtgtattcccataagaggaccaaaaccataggcaagctgccttgatcgcaagaatggtatcaaagttcctaaagatcttctcatttcttaataaacaaaacttttaaggagcacaaataaagcttgatctttacctggaactgtaatttccatcccatgcaatccttccttatcaaaccaaactacaaccttcacacctttctccttcaacattttcacaaattccatctcacggtccatcaaagggtcctcaccacccacactcacaaaacacttctcaatcaacccaatgttttgtttataactactatcaaccattggattacaatactcgtgaccgcgatcacaccctttcggcaacgacaactcccacatcaaatcattcacagctaaaggaagaagcgtatcatttatcaatctcaattctgattcagtccttttggacccaccaaaaaaaggtgaatttaatatgaatcctttgattatcaaagggtcaagatccaatgataacgcacgtaaacctgcatggtacacaatgttgccacctgcactactccccatgagatagcaattagaaaaatcagcaaaatcttttaaccattgctcaccattcatatctaatgcttggtttttaacccaatttatagcttcaattgtatcttcataagctcctggaagtctactttcaggtgctaaacgatactcaattgaaacaactaaggcaggtaatatatttgccatagaagcacaaaagttgtgaaacacagtatctgaagcactctgaagaatgaaaccaccaccgtgactataaactataataggaagctttctattaagagatggttcattgggtctaaagagtcttacccatgttttcttagtagtgttaagagagatgtctttggcgtttttgacatcaggtgtaataggggtagatgggaagtggttgtttctagtgagtgtgtcatcggagggattgtaaatgatattaagaaatttgtaaggatcgatgggttcaacggatgaattttgatcagccatgttaaaaatggactaaaattatttgtttatggaattagagaatggagaataactgatcaatcaatggaatgggtcccgcgaatggggagcccgcaggccga

SEQ ID NO: 292 - DNA, 1475 bp, Jeffersonia Diphylla
catttatcccaacctccaatgtcatccatctctttcattgacaaacataaaattgagcaataaaattgggaaacagtactacttatcatccaaatttaagctaaatacaaaaattaatttactttgcattctcaagagaaagttcactgaaaactgattttgtcagcactaaacacctctctccaaaatcaaccttcaagttatcttacaataccaatcacttgcaaataggccatggttcttgtgcttcttgagtcagaacacactgcaaaaaaacatttttatctcactatatctgcatagttgggacttgggacgccaaaccttcgggacagcaaaaccggactcacaaagagatcatgacacagacaacattgaattggctttctccagattttattataccttgtcactagctttattattcaataggtttatcaacactagcagcagttacaggtgaatagataaaatccttaagatccatcaccaaggcccgacccttgtctggatcaaagaactctacagcatgataagcatcagcatcatcaaagaaatgttccacaacacacaccccatgccctttcaacttctcaaccaactgtttctcacgatctactaacgggtccatttcatagccattgacatagcacgttggcaacctctgaatgtctttttggttggacccttcgaccattggattagaatattcatggtctcgatcagttccaactggtaacgcaagttcccacattaaatcggcaacgggtaatggcaagatgggatcatccacacatttcagttcggattcagttctttcaacgccaccaaaaaatggtatattaagaatcaaacctctgatctcgaccggggaaatattcaagttaagcgcgcgtaagccagcgtgataggctatattgccaccggaactactacccatgataaaacactgtgtaaaatcaacaaaggtggtgaacttgtgctcaccatgcaaggcttgttgtttcagccaaagcacagcatcaacagcatcctcgtaagctgctggtaggcgattttcgggggccagacgataatccacagagagaactaaggcaggtgtttcaccagccaagtgaacacagaaatcatgcaaggttaaagaagctgcgctaaacagcagaaaaccacctccatggaagtaaactatgatagggagctttgtgtcggaaggaagatttagggggtggaagattcggatccatgtgttggtggtggtatttagggggacatcaatggaggcaactgatgaatcgttgtagtcgtaacctgttggtggtgtggtaggtacagaagagtctagtcgagtgatagaaccgtctgggttgagaatgaagttcagagcatcatatggatccatagagaattagaatgataagaagaggatgaaacaggcgatcccttttttcttggtttggcctgttgacttcagagtt

SEQ ID NO: 293 - DNA, 1367 bp, Mahonia aquifolium
aatgccgaggcatccttcgaatcttcagcgatggctcgatcttccgctcacctgatccatgcttcaacatccctgtccacaaggatgagtctgtcctctttaaagactgtcttttcgaacccatccaccatctctaccttcgcctctacagaccttccaccatcaccaccaaggccaaacttccgatcttcttctacattcacggtggtggcttctgtatcggctcacgaacctggccaaatttccataacttctgtttttttctctctacccatctccaggctgtagttatctctcctgactatcgattagcgcctgagaatcggcttccagctgccattgatgacagctttgctgctctcaagtgggtccaagatcaagccctgttagagagctgtgacccatggttgtctgactttgcagattttagtagagttttcatatcgggtgagtcagctggtgggaatatagcgcacaatttggcggttagactaggttctggatcaccggagttggctccggtgagagttcgagggtatgtgcttttggcgcccttttttggtgggactgtgaggacgaagtctgaggcagaggggccgttggatactttcttggacttggagcttattgatagatattggaggctgtccataccagttggagacactgctgaccacccgctggtaaacccattcggaccaattagccctagtctcaaaccgaagacactcgatccaatctttgtaattgttggtggcaaggatttgcttagggatcgatgccaggattatgtaacaaaattaagagaatggggaaaattggtcgaatatgttgaattcgatggaaagcaacatgggttctttactattgatctcagttcagaagaggcaaacaagttgatgcaaattatcaaacagttcattgctgaaaatttcaaataaggatctgaagctgatagctacatttgcgacttgccgctcagtattctctttacggtgttggtgcaacagcagccagtagattggatgttaccaaagtcattgtgatggatatgggttagggtgagtagatcatgtttgggaagttctatttacaattaactgttaggaagagttactgaggacatcgttcgacttctaggagaggtactgtaaataactaaagttgtgcgataagagtgaagaattggcggaataaaggaagagaaaatggaaggaacgaagaaatgtgggaagatgaaagttcaatatctggttttgtaaaaactggtgcaagtataaagagaggaatgtaatctatgtcaacgtacatgtgcttggaaatctgactgtacatgcgttcttcatggttatttgattaatggtgtt

SEQ ID NO: 294 - DNA, 1263 bp, Menispermum canadense
tgagatctccttgaattaaataacttatatctgctcatcatcttcgactcttcataaccatggaaaaccagcagcctccgttgctcaacaccaccgatccttacgaaacactaaagatcgtctacaatgccaacgacgacaccctcactcgcctctatcccatcccctgcaccgccgcaacaggtgatcatcacaacctgcccatcatcaccaaagacatctgtctcaacaccacacacaaaacctggctgagactcttcatacccacagaaccaccaccgagtccaaacagcctccctctcataatttacttccacggcggtggcttcgtcctctgcagcgcagccaacactctcttccacgacttctgcgctcgtatcgccgccgatctcccggccgtcgtcgcctcggtcgagtaccgcctcgcgccggagagacggctgccggcggcgtacgaagacgccgtggaggctgtgaattgggtgcgggagcacgggatcaaggagaagtggacgagggattttgttgacttttcaaagtgttatcttatggggaacagttcaggagggaatatagcgtaccgtgcgggcctgcgatgtggatcgttggatctggaaccggtgaagatcgtggggctggtgttgattcagccgtattttggtggggttgagaggagtgagtcggagatgaggttggcgaatgatgggcattttccgttagtggtgaacgatctgatgtgggagttggctttgcctagaggggctgatcgcgatcacgagtattgcaatccgatggttgctggggctcagtgggagaagattgggaaatgttttgtgagcgtgcgcggtggggacccggtgatggaccgccagattgcgttagcgaggagattggaaggagagggagtgaaggtggagagttggtttgaggaggaaggatatcatgggattgagctgtttgatcctgtgaaggcatcggagttgctgctcaagttgaaacattttatttgccctcctgaagctgctgagtatagagtcgttgaaaagtagtagtcgagttggaggcgtgcgtcggtttctcgtgtgtgtgggttttgtttccaacgcattaccaaatagactcaattttcaaagctcaaattgtttttatttccttaaacttatactaattaatctttgtagcaccatgcacgcttgcacccctgttatgcacatccgagctcacatttctttttttcccatttcttaatgccttaccttcttt

SEQ ID NO: 295 - DNA, 1125 bp, Menispermum canadense
aaaccgtggctactcaagcttcaacttcaagcgccatggatgatccctacaagttcctcaacatcgtccccaacccagacggctcgctcacccgactcacccaaatccccacttcaccaccatctcatcatcctgaagccaccagcaacaaatccattaactcatcacttaatgatcactcagtcatctccatggatttctctctcaatcccgccaccaacacctggctccgtctcttccgacccaacaccactacccctcaacacgtcaagctcccaatcataatctactttcacggcggcggctttgttctcttcagcgctgcatctcaaccctttcacgactcctgcgccgccatggccgccgacctcccggctctcgtcctctccgtcgagtaccgcctcgcgcccgagcaccgtctcccggcggccttccacgacgccgtcgacgcaatcgtgtgggtcaagcaaaaggctcttgaacaacattggctctgtgatttggcagatttctccaagtgctttctcatgggcagcagctccggcggcaacatagcttaccacgccgggctgcgcgcgctgggcctggatctcgggccggttaaggtctccgggctgatcttgaaccagccgttcttcggcggggtcgtgaggacggagtcagagctgaggctggccggcgaccggatcttgccgttgcctgccggagatctgatgtgggaattggctctgccagttggatcggatcgagaccatgagtattgtaacccgattatgaaagatagtaatggcggggacattgagaggctgccgaggtgctttgttaatgggtacggtggggacccgttggtggatagacagaaggaatttgtgaagatgttggagcagtgtggagtgagtgaagtggcgcgctttgttgatgatgggtatcatgctgtggagctgtttgatcagagtaaagctaaggatctggtgatggccatcagggcttttatttacactacctctgcaactactactccaaaatcgactttgtaaaggtggaaagatcgatagataagtaattagttgcttaatttgtatgttaattatagttaaaaaggttttaagagttgtgtggtcttta

SEQ ID NO: 296 - DNA, 993 bp, Menispermum canadense
acttgtaattaagaagagtaaacgaaatccttgatctgtagaaacaattcctgaaccttacttggatcagccatctccgcaccatgaaaccctccatcttcaatcttgaccaccaccttcaccccatgtgcatccaacatcttggctaaccccttgattctatccaccagtgcgtcccctgcaaaccctcttatcagacaccttggtaaacattggatcttctgattaacaccatccaacggattagaatactcgtgatcacgatcacttccaggaggcaatgacaacacccacaacagatcactaacagccattggtaaataaggatttctgcttaatatttcttctgattgagttcgttgaatccctccaaaaaatggctgattcaatatcagccctctaatctggaccggattaatatccacatccagagctcgtaaacctgcttggtaagcaatgttaccacctgcactagtacccataatatgaacgtttgaataatcagctagctctttcatccacggatcacatccattgatttctcttgcttgatcacgaacccacatgatggcctccatggcatcatcataagcagcaggaaggcggtgttctggggcaagacgatactcaacggttatgattaaagcaggggcgaaagcagctgcacggctcaacatatcatgaaatggagctgaaatagcactcaagataacgaagccaccaccatgaaaatcaatgatgataggaagtttcttactgtggtggagagggcggaacaagcgtaggaatgtttggttgctggtgttaaggggaatgtctttggagagtgctggctgtcttcgtgacgataagttggctgattcagaggcaagttcaggcgtgggaggtactcgggggaattcgtagcctctggtgagtgaaccgtcaggattaagagcaattttgaggaactggtatggttcatcgatgaccgagggatctcttagatcggaa

SEQ ID NO: 297 - DNA, 893 bp, Nandina domestica
aatctaatccacaaatatattctaaaattataaaaaccactcatatgtagtcttgttgactcatctaccattcaacaacattcagtcattcaagtgcttctgaacggataaaattcttcaaagccacaagcaattcctcagccttttgtggttcaaacaactccatcccatggtacccttcatcatcaaaccacttcacaaccttcacatcttttttctccaacatcctcacaaactccatctggcggtccatcagtgggtccccacctctcatactcacaaaccatgaacaccctttcatcaactcaatcttctcttgatcatcatcatcatcatggaccattggattcgaatacttatgatcgcggtcaacgccttttggcaaagccaactcccacatcaaatcactcactgctaaaggtatcttctgatcattcaccaatctaagctctgactcagtcctcttggtcccaccaaaaaagggttggttcaatatcaacccttggatcttcaaaggctttatatctaaccctaatgcatgcatacctgcatggtaggccatgttgccccctgaactgcatcccatgagaaaaaacttagaaaaatcaccatattttctcaaccactcttcacctccatgcatatccaaaccttggtttcttacccaattaatggcttctatcacatcatcgtaggcagccggaagcctgctttcgggcgctagacgatactcgacggagagaatcaaggcaggtaagtttgtagccaaagatgtgcaaaaattgtggaaaaatgtattggctacgctgcagagaatgaaaccaccaccacgaaagtaaagtacaagagggagcttaagctcaccactattgctaagtgtttgttgaataggt

SEQ ID NO: 298 - DNA, 1395 bp, Nandina domestica
ggaattcgaattagcttttaaaccgaatttattgcccatatgatgttacttccttggcctattatactgtgaattacaaaaaggacttggcacaaataacattacgtaaagcgacccaaactaatctagttcgaaacattccaaattcctataatccatttcttattgtgcaccaccattgccaaaccagtccaccacttgtgccgcacacattaagcaccacgtaaaacacacagaatccaagcaaattacaagaagttacgatggtggattaacagatcaactgccatgagcaccatcaccagttgtagaagagtaaataaattccttaagatccatgtacaaggcctgagccttctcctgatcaaatagctccacagcatgacaaccatcatcgaagaaatgtgcaatgacagacaccccttgtccctccaacattttcacaaactccttctgacggtctaccaacaggtccccaccatgcccattaacatagcactttggtagcttttggatctgcacaaggtcccacacctgaaccattggactacaatactcgtgatctcgatcagccccaataggcaatgacaactcccacattgaatcagtagctagcagtggcaacaccttatcattttcatatttcatttcggatccagttctttcaaccccaccgaagaagggctgattcatgattaacccattgatcctaactggttcaagatccaagttcaatgcccgcaagccagcctgataggccatgttaccaccggaactactacccattatatagcactttgtaaagtcagcagaatcaatgaacttatgctcaccatgtaaggcttgttgtttgagccaaagcattgcatccaccgcgtcttcataagctgatgggagacgattttcaggggctaaccgatactgaactgatagaattacgacaggtagttcaccagctatctgaatgcaaaattcattcaaaggcaaaatccttgcagtgtccataacaaaaccagatcccggaaagtaaagtatgactgggagttttgtactaacggaaggaagattgagagggtggaagattcggatccatgtgttcttcatagagttcagaggaacatctatggttgcgacgttttggggtggggttgaatcagtgtaacctgttggtggtgcataaggaaatataggaggtcgggtgaacgatccatctgggttaggaatgagattgagaactttgaacggatccatggggactttcacagtttgagaattttcggtttttatacagaagttgtgttaaaaattcaacaactaggtgatccaaaggcagtcttaatgcctatgtttcccacgaagctttaccaagacgaatcttgatgatttatctaaacc

SEQ ID NO: 299 - DNA, 1177 bp, Nigella sativa
aaaaaaataaacatattaaaagaatagaaccattgtcatgcacatgtatattttgtcttcaatcttattacaactgacaatgatatttgacctctcggaacggccatcaacttacactaagagacaacaacatcaagaagaagaataaatgaattctttaaccttctcaattaactcttgacccttggttgcatcaaacagctcacaagcatgaaaaccatcatcactaaaatctttaacaacactaactccacgtccctccaacatctcaacaaactccttctgtctgtcaattagtggatccccatcatgccctcttacgtagcaccttggcaactctttgatctcctcctcttcagaacctccctcagccattggattacaatactgatgatctctatcagctccaacaggcaaacaaaattcccacatcaaatcagcaaccaccaagggaaccaccttatcatttacaaatcttaattcagacccagttctttgaatcccaccaaagaatggttgattcataataagccctttaatcttaactggttcaagatccaagactaaagcctttaaccctacatgataagtaatatttgcaccagaactacttcccatgatgaaacattttgaaagatctataaattcccaaaacttatactcacctttcatagcattattcttgacccaaagaagagcatccacagcatcatcataagcagaggggagcttattttcaggggcaagtctgtaatcaactgataagatgatggctggtaattgagtagccatttgaatacaagatacatgaaatggtcttgaagatggactgtaaagaataaatccacccccatgaaagtaaattatgaggggtagcttttgatttgaagaaagatttggtggttgaaagactctcatccatgttttgtttgaagggttgagaggaatatctaatgagattacagatttggggtcatcagatgtgggaagattgggaacttgagtgggtctagtgagtgaaccatctgggtttaggactatgttgatgactttgtatggatctagagcgactgagtttgggttttcatctgccattgtaaagatgagattctctgagatttagagggtttcttttataaagaagccgtcatttaatctcagagaatctcatctttac

SEQ ID NO: 300 - DNA, 1200 bp, Nigella sativa
cttgagcattcattagctttatttgcaaaagataaatcgaactaaacaagaaaatcaaccaaacacaacacattagatataaacgttatttgtaaaacatgggcattcataaacattatttctaaaacatgggcactcagtcacaaagttgacttgttagtttctggggaggagtagatgaaatccttaaggtcgacatacaaagcttgagccttatcagggaagaacaactcacaagcatgaaaaccatcttctaagaagtacttgataacagaagccccttcttcctctaacatcttaacaaactccttctgacgatcaatcaatggatctccaccataccctctcacaaaacaccttggtaaccttttaatctcttgattttgtgaccccttcattggattacaatactgatgatctctatcagctccaacaggcaaacaaaattcccacatcaaatcagcaaccaccaagggaaccaccttatcatttacaaatcttaattcagacccagttctttgaatcccaccaaagaatggttgattcataataagccctttaatcttaactggttcaagatccaagactaaagcctttaaccctacatgataagtaatatttgcaccagaactacttcccatgatgaaacattttgaaagatctataaattcccaaaacttatactcacctttcatagcattattcttgacccaaagaagagcatccacagcatcatcataagcagaggggagcttattttcaggggcaagtctgtaatcaactgataagatgatggctggtaattgagtagccatttgaatacaagatacatgaaatggtcttgaagatggactgtaaagaataaatccacccccatgaaagtaaattatgaggggtagcttttgatttgaagaaagatttggtggttgaaagactctcatccatgttttgtttgaagggttgagaggaatatctaatgagattacagatttggggtcatcagatgtgggaagattgggaacttgagtgggtctagtgagtgaaccatctgggtttaggactatgttgatgactttgtatggatctagagcgactgagtttgggttttcatctgccattgtaaagatgagattctctgagatttagagggtttcttttataaagaagccgtcatttaatctcagagaatctcatctttac

SEQ ID NO: 301 - DNA, 1200 bp, Nigella sativa
aaaaaaataaacatattaaaagaatagaaccattgtcatgcacatgtatattttgtcttcaatcttattacaactgacaatgatatttgacctctcggaacggccatcaacttacactaagagacaacaacatcaagaagaagaataaatgaattctttaaccttctcaattaactcttgacccttggttgcatcaaacagctcacaagcatgaaaaccatcatcactaaaatctttaacaacactaactccacgtccctccaacatctcaacaaactccttctgtctgtcaattagtggatccccatcatgccctcttacgtagcaccttggcaactctttgatctcctcctcttcagaacctccctcagccattggattacaatactgatgatctctatcagctcccacaggtaaactcaactcccacatcaaatcagtcactggtaaaggcaagatgttatcattagccaatctcaactctgacccgctcctctcaaccttaccaaagaagggttggatcatgattaatccattgatcctaaatggttcaagatttagcttcaaagcttgtaaaccaagttggtaagtgatgttaccaccagagctacttcccataataaaacacttggagaaatcaacataatcaaagaagtcgtacttatactcacccttaaaagcatgattcttgacccaaacaaccgcatccaaagcatcttcataggctgagggaagtctatcctctggagcaagactatatccaactgaaagaaccaaagcaggcaattcactggctatttgaagacagaattcactgtaaggaggagatttggcgctgaaaataaggaaaccacctccatggaagtagatgatgagagggatttttggagtcgtgggatgaatgggtggctggaaaattctaatggaagtgtttctgttgggattgagagggatatctgtgcagacaacagacttggtggtgttcaaggatagtgtactaagagggtgggggtgtctagtaagggatccattggcgttaaggactatgctgagagcttcaaatggattaattgttgagttttggttttgagctgccatgtttagattcttgaaagaggatagtataggctagaatctagattaacatcaaaggagaaccagagttattgtcaactggtcacatggctgggtaggtggttg

SEQ ID NO: 302 - DNA, 1223 bp, Nigella sativa
cttgagcattcattagctttatttgcaaaagataaatcgaactaaacaagaaaatcaaccaaacacaacacattagatataaacgttatttgtaaaacatgggcattcataaacattatttctaaaacatgggcactcagtcacaaagttgacttgttagtttctggggaggagtagatgaaatccttaaggtcgacatacaaagcttgagccttatcagggaagaacaactcacaagcatgaaaaccatcttctaagaagtacttgataacagaagccccttcttcctctaacatcttaacaaactccttctgacgatcaatcaatggatctccaccataccctctcacaaaacaccttggtaaccttttaatctcttgattttgtgaccccttcattggattacaatactgatgatctctatcagctcccacaggtaaactcaactcccacatcaaatcagtcactggtaaaggcaagatgttatcattagccaatctcaactctgacccgctcctctcaaccttaccaaagaagggttggatcatgattaatccattgatcctaaatggttcaagatttagcttcaaagcttgtaaaccaagttggtaagtgatgttaccaccagagctacttcccataataaaacacttggagaaatcaacataatcaaagaagtcgtacttatactcacccttaaaagcatgattcttgacccaaacaaccgcatccaaagcatcttcataggctgagggaagtctatcctctggagcaagactatatccaactgaaagaaccaaagcaggcaattcactggctatttgaagacagaattcactgtaaggaggagatttggcgctgaaaataaggaaaccacctccatggaagtagatgatgagagggatttttggagtcgtgggatgaatgggtggctggaaaattctaatggaagtgtttctgttgggattgagagggatatctgtgcagacaacagacttggtggtgttcaaggatagtgtactaagagggtgggggtgtctagtaagggatccattggcgttaaggactatgctgagagcttcaaatggattaattgttgagttttggttttgagctgccatgtttagattcttgaaagaggatagtataggctagaatctagattaacatcaaaggagaaccagagttattgtcaactggtcacatggctgggtaggtggttg

SEQ ID NO: 303 - DNA, 1472 bp, Nigella sativa
ctttttacttgtaaacagggtatttgctaatttttcaagccattctgtcacaaggaagaaccagagcaagatcctttaatccatggacaccttcaaacaactaagtattacctacaatccagatgatgatactatcgaccgactcgtgaccataccttgtaccaccactaaccatcacaattcccttccaaaccaacaaatcttcacccacgacattcctttgaattcttctcacaaaacatccctcagactctacaaacccattaaccctcccctccatgcaaaacttcctcttgtagttttcatccatggcggtggcttcctcttcgccagtcctttcaacactatctacaacgatttctgcacttccatggcaatttccttgggtgttgttgttctttcagtaggttatcgtcttgccccagaaagtcgcctccctgcagcctatgaagatgctttggaggcgttgacttgggtaagagatcaagctgataacattttgttgaaggacatggttgatttctccaattgttacctaatgggagatagtgctggtggtaatattgtctaccatgctggcctccgcgctttaagtataaatcttgagcctttagtaatcaaaggatacatattcattcaaccctttttcggtgggatgaagaggactgaatcagaagtgaggttagcagacgataagatcttatcatcagttgttagtgatcttctgtgggaattaggattgcccaaagggtcagatcgagatcatgagtattgcaatccaatggttggtgggggttttagtgataagattgaattgcttaccaggtgtttcctggtagcgcttggtggagacttactggtggaccgtcagaaggagtttatgaagatgttggaagaaaagggtgtggaggttgtgagctggtttgaggatgaggggtgtcacggtatgtttctttttgaaccagaaaaggctttgcatttgttcgaggtcatcaaagactttatttaccagcctatgcctactgtttgattgtaatcttctgactaggttttcttcttgctctctatggaaactctaagtctattctaagtctatatgatccctccacatatgagatttcgtgattaagttcagaaagttatttgtctactccggcgtagaaagaacaaatttaacaaggggaagagtagaagctactataaaggtagcaatgggggcgggtcgggttgtgttcgtatcgggtcttaacaggttagcggataattgaccttgtacctatatccaactcatttagttatcatgtatggtatataaaactcgtacctaactcgttaattagcgggtatacccaactatacccgtttaaacccattagtatttagtttcacattttttaattaacatgtaaagacttgtttacctatttaaccgataaaaatgtgtcaaaacttattaactttatgcccatatc

SEQ ID NO: 304 - DNA, 1102 bp, Papaver bracteatum
ccagtatagcatacatttcttgaagtaattgaataaaccaaggtgtacctgcgtttctcttataattttgaagctcctgataaaatgaagtctttgactcttggtaacatgatttcaagttcttcaggctcaaagtaaaccattccatgatacccgccttcttgcataaaagtttcaaccttgacaccttttccttccaacatcttcacaaattcaacttgtctatcaatcaatggatctccatcacacccaataaccaaacatttctttataaacccacatttctttcgtaacgattcgtcgtcttcgttgatcaaaagattacaataaggatgatttctattagacccaatcggcaaagacaattcccacatcaagtcacttaccgggagagacaaaatcttgtcattgattagtctcagttcagaactagtcctttcaattccgcccagaaatggttgattcaatataaccccggaaattttcaaagggctaagatccaattccgatgctcttaaagaaacgttgtaagcaatatttccacctgcactttctcccattatataacaatttgtaaaatcagcgtaatcccttagccacggctcacttggtttacctccggaagcttgatgtttgacccagtttagagcatcaacagcatcatcataagcagccggtaatcgactttccggtgcaagacgatactctactgaaagtactattgccggcaaagcgtttgccttggatttgcagtaatcatgatatatagtccaaaatgtgctgcaaagaatgaacccaccaccatggtaataaattatgaccggaagcttatttgctgtgggtaaatcttgaattgtgggtttgaagatacgaatccaagtattgtgttgagcattgagaagtatgtctttggaatttggatcatctgtcgtgtttgtaatttgaagtgggagatttcttgtcagggtatcaagatcaggatcgtgaacaaccattaaggcttcgtaaggatcgatggtactactagtagtagttgaatgttgatctgccatttttggatgtggattaaggtttaggggatgtgcgcttgggatggttttag

SEQ ID NO: 305 - DNA, 1878 bp, Papaver bracteatum
taaaccttaatccacatccaaaaatggcagatcaacattccatcgatccttacgaagccttaatggttgttcacgatcctgatcttgataccctgacaagaaatctcccacttcaaattacaaacacgacagatgatccaaattccaaagacatacttctcaatgctcaacacaatacttggattcgtatcttcaaacccacaattcaagatttacccacagcaaataagcttccggtcataatttattaccatggtggtgggttcattctttgcagcacattttggactatatatcatgattactgcaaatccaaggcaaacgctttgccggcaatagtactttcagtagagtatcgtcttgcaccggaaagtcgattaccggctgcttatgatgatgctgttgatgctctaaactgggtcaaacatcaagcttccggaggtaaaccaagtgagccgtggctaagggattacgctgattttacaaattgttatataatgggagaaagtgcaggtggaaatattgcttacaacgtttctttaagagcatcggaattggatcttggccctgtgaatattaccggggttatattgaatcaaccatttatgggtggaattgaaagaactagttctgaactcagactaatcaatgacaagattttgtctctcccggtaagtgacttgatgtgggaattgtctttgccgattgggtctaatagaaatcatccttattgtaatcttttgatcaacgaagacgacgaatcgttacgaaagaaatgtgggtttataaagaaatgtttggttattgggtgtgatggagatccattgattgatagacaagttgaatttgtgaagatgttggaaggaaaaggtgtcaaggttgaaacttttatgcaagaaggcgggtatcatggaatggtttactttgagcctgaagaacttgaaatcatgttaccaagagtcaaagacttcattttatcaggagcttcaaaattataagagaaacgcaggtacaccttggtttattcaattacttcaagaaatgtatgctatactggactattctgttgcgcaataagtttgcaaaatttgtccttctctctgtatcattccaatttattgcaaaaatttccaataacttctcttttctagtccattttggatttcttgccaattatgtatcctttccttgaattaggagcgtggatcttcaccttctttagtttccaaccatcagatccagataggggtaagtgccaatttaacagttgttttgtgtttttccattttttgttctttctaccgacagttgtgtatgtatgcacctcccaatatatatgagctcgttcaggcaatcacaaaccacagttcatacctttacccaatcatttatccaacaatggctaaaacaggtttcgcctgggctatcgatactgcaacaaccgatccttacgaaaaactaatgtgcatccacagtcccgaagaagatactcttgtcagaaacctcccaatcccagttacacccttagatcaaaacaccaaagacatttctttaaatcctgaacggaaaactttgattcgaatttttcgaccaccaaccgaactctctgtaacaaataagcttcctgtcataatttattttcatggtggtggtttcattcttttcagtacagcttcaactattgtccacaatttctgccaatccattgctactcatttacctgcagtagtcgtttctgtagactaccgtcttgcgccagatagccgacttccggctgcatatgatgatgctgtggatgccctcaactgggtcaaaaaccaaggtttggacaccttaaatggtgaaccatggttgaaagagtatgctgatttctcgatt

SEQ ID NO: 306 - DNA, 2521 bp, Papaver bracteatum
tgcaattttattgtatgaattccatgaccttctaggaactgccgaacatgatttatagtggcatgggatcatagatatccttgacttacagaaccttggaaaacataacaaggtttataagaaagcctcccgtagaaggagggttgtaccacgattttatcaactggctgcaagagaacattgtcagtcacactcatagttgtttcagtctttctatttctttgtctcgattagagacgatgaaacctaaaaaccatcatgtacaaattccttccatcacttgcaccaaaataacatatacacattacacactggttaatataaatcaatgttcagtcaggacgtggttcaagtgacataccatttgacccttttatgtgccaatcgtgttgcaggcaaatatatgtagcagtttggcgcactttaattcaggttataaaggcgcagagtcctaaaactttggggattccaccacccacccaaatgcaggtgcacgtctcacttcgagagaaattgcaggcccgggcagtgaaattgctgcatataataatccaaactcccatcagtcaaaattaaccctacatcagcatctcttcttcatcttaacagcgtctcttcttcatcttgtagtttcctgagcgtcttctttgcatagagtgtgataaaaactgtaacaccaactgttaagacgaatccaatggcgttgtagataatttgagatgtcgaaagatactggtgcccttgtgtggcatctgccaagcttgcaactaaaatcccactgtagattgaaacaaatatttccggcaccactcctaccagcgacccaagtatatacggacaatatttaacaccagtggcaacagaagcataattgaatatgataaatggaaaaggtgaaattctaagtaaggcgacagctcgaaattgatgaaaccaatctccttcaccagctaatcttatgatggcagctttgtctggccatttagccaaccacacctggattttatgatgaaagagagaaccaataaagaatggaattgacatgccgatgctaaacccagctagaatcagcagaaatccatatccataaccaaaactaatgccagctacccacatagaaggggaagatgggatgcacagggcagggaaaaatgtcatagaagcaaacaatatagccgccagcaccttaggactgaatgttctcatttcccagtccaagattgggacaatctccttattcaaaaggaaaggtccaacccagatgagaaaaacaacagcaacagtagcaataacaatccctaacaaacccatcttgaaccaccaacaccaattaatccctttcctaggtgataatggaggtttcaatatctcttcaacttgattatcagaacttctcagcgtcacataatcttcatctcctcgatccattttcacttttattaacaatggtgctaccacttcatccttaccatcataatatgtcatcactcttacagaaaaaaatcaatcaatttcgattaagatcccaaacccaaacgaactactcggaataatttacaacccagctactgatagtcttactagaaactctcccaatccaatcaccaattcagatgatgatccagacaccaaagacatcgagttaaaccccgaaaacaaaacctggatcagaattttcagaccatctgaatctcaacataaccatgaacaacttcttccactgatagtttactttcatggaggtgggtttatcctatgtaatgcaaattcaacgattttccataacttctgcaaatccatggcgaatcagttatcagcgatagtactctctgtagagtatcgccttgcgccagagaaccgattaccggcggcttacgaggatgcggtggaatctctagtttgggttcaaaaccaagctttggacgccataaatggagaaccatggttgagaaattatggtgatttctccaaatgtttcattatggggtgtagtgcaggaggaaatattgcgtacaattcatgtttaggagcatcagaattggatttagaaccaataaagatttgtgggttaatattgaaccaaccatattttggtggagtagaaagaagtaaatctgaattgagattggttaacgataagtgcttgccttcagttgttaatgatttgatgtgggaattaggattaccagttggggttaacagagatcatgtttattgtaatccatttgttgatgagaatttagaaacaaaattaaggtttataaggagatgtttagttacttgtagtaatgaagatcccttggttgatagggatatccagtttgtgaagatgttggaaggaaaaggtgttaaagttgtgagttggattgaggaatttgggtttcatggaatggcacattctgatccagtgaaagctcaagaattgttaaaagttgttaaagatttcattttctctgaagattgagtttactgtcatgttgtacttctattgctgcttggagtgctataataaaatggtgta

SEQ ID NO: 307 - DNA, 1133 bp, Papaver somniferum
aataaaaatccaacaatggcagatccttatgaattcctaatgtgcattcacaatcctgaagaagataccctaacaagaaattttccgattcctgctactcccttagatcaaaacaccaaagacatttctttaaatcctgataggaaaacctcacttcgaatctttcggccaccaaccaaagaacctcctgtaacaaagaataagctgcttcctatcataatttatttccatggtggaggtttcattcttttcaatgcagattcaactatgaaccatgacttttgtcaatcgattgctacacatatacccgcgctggtcgtttctgtagactaccgtcttgctcctgaaaaccgacttcccgctgcctatgatgatgctgttgatgctttaaactgggtcaaagaccaaggtttaggcaaactaaataatagtgaagtatggttaaaagagtatggtgacttctcaaagtgtttcattatggggtgcagctcaggtgctaatgttgcatatcatgccagtttaagagcaatagaaatggatcttgaaccagctaagattaatggattaatattacactgccctttttttggtagtcttgagagaactgaatcagattcaaaagtgatcaacaatcaggacttgccgcttgccgtaagggatgtcatgtgggaactggcgttgccgcttgggtctactcgtgatcacgtttattgtaatccgaatattgatcatgatggatcatcatctggaaatatggtggggttaatcgagagatgttttgtggtaggattttatggggatccacttattgatcgacaaattcagctggtgaagatgctggaggaaaaaggtgtgaaggttgaaacttggattgaacaaggagggtatcatggggtgctatgctttgaccctatgatacgtgaaacctttttggaaaaactaaaacattttattttaaacgacgaatttatatactaaaatatattattagtattaaacaatgaaattcttattttttctaaaatgagcttttggacgaaacattgtgtacgaactagctgatgtaatttttcgttttaccggatttttcattttttttgctttctttctgctctcttttataagtcgttctt

SEQ ID NO: 308 - DNA, 576 bp, Papaver somniferum
cgctgcctatgatgatgctgttgatgctttaaactgggtcaaagaccaaggtttaggcaaactaaataatagtgaagtatggttaaaagagtatggtgacttctcaaagtgttttattatggggtgcagctcaggtgctaatgttgcattttcatgccagtttaagagcaatatgccagtttaagagcaattagaaatggatcttgaaccagctaagattaatggattaatattacactgccctttttttggtagtcttgagagaactgaatcagattcaaaaagtgatcaacaatcaggacttaaagtgatcaacaatcaggacttgccgcttgccgtaagggatgtcatgtgggaactggcgttgccgcttgggtctactcgtgatcacgtttattgtaatccgaatattgatcatgatggatcatcatctggaaatatggtggggttaatcgagagatgttttgtggtaggattttatggggatccacttattgatcgacaaattcagctggtgaagatgctggaggaaaaaggtgtgaaggttgaaacttggattgaacaaggagggtattt

SEQ ID NO: 309 - DNA, 1230 bp, Sanguinaria canadensis
agatcatcatcaattatctcaactagcagcttctgttaactactccattgatccttacgatcgcctcaagatcgtccacaactcagacgatgactcactcattcgactcgttccgctcccaagttacccttcaacagatgatgatgatcaaaactcatgcaaagacatccttctcaaccctcaacacaaaacatcgatccgaattttccgaccaaccaccacacaatttcaacaatcttcgaagaagtatgatttttctgtgaaaaacaaacttcctcccataatttacttccatggcggtggatttatactcggcagtgcattcaacatagtctttcacgactactgcaaatccatggctacccaattacccgctttggtactctccgttgagtaccgtctcgctccagaaaaccgtctcccagccgcctacgacgatgcaatggacgccgtaaattgggttcgaaaccaggccttggacgccattaatggtgagccatggttgagggattatgctgatttctcaaagtgttttcttatggggtttagcgcaggtggaaacattgcatatcatgctggtctacgagcattggaattggatctggaaccaataaagatttctgggcttatattgaaccaaccttattttggtggatcaaagagaaccagatcagagctaagattgactaacgatccgattttgccatgccctatgagcgatctgatgtgggaattggctttgccacgcggcgctaatcgagaccacatgtattgtaatccgatggttgatgatgtgactcgtagaggaaatcgtaataaggtggggttggtaattaggaggtgtttgatggcggggtgtgatggggatccattgatagaccgtcagattgagtttgtgaagatgttggaaggtaagggagtaaaagttgagacttggatggaagagggaggttcccatgggatggtttttgccgatcccaaaaaagctgaaatcctgtttggaaaactaaaagacttcattttcactgatatcgttactaagggagctgcaaactgaaatcgaaaggtgtttttgttaattaagggcatgttaggtgttttagactatatgatagatagtactacactgtttaactattgtggatgaagattatggtagaattataattagattaggaaagattatgattgattgatttggaagatttttttctattttattaagatttg

SEQ ID NO: 310 - DNA, 1118 bp, Sanguinaria canadensis
attcatacttcaaaaaacaaaattcatattcaaattggaaatcggacccatacataagatgtatgattaatagcgaaagcgaatacattttattatgtttcttttcaagtccactacgcaccacacaaactttactaagctataatttgcattccacaccatttcaaaagatttgattacaatactcatgatttcgattagcccataggacacaaaatcacttgcagaagagtaaacgatcgataggtatcgacgatttagcagccccagtggtagaaacaccaacatcagttgcagaagagtagataaatttcctgacatttgttaccaaagcccgagccatctcaggatcaaacaactccacagcatgagaaccatcatcagcaaaatgtgccacaacacacaccccgttcctctccaacatcttcacaaactccttctgatgatcaaccaatggatctcgtccattcccattaataagacaccttggtaacatacgaatcttgcaataatgagacttctcaaccattggattacaatactcatgatttcgattagccccaattggcaatgcaaattcccacatcaaatcactaacaggtaatggcaagatctcatcattcgcatatcgcaattcagatccagttctttccactccaccaaagaatggctgattcaagatcaacccattgatcttaactggttcaatatccaaatccgccacccgcaaaccagcctgataggctatattaccaccagagctactacccattaaaaaacaccctgtgaactcaacaaagtcaacgaacttatgctcaccaccatttaaggcttgtttcttgagccaattaatcgcgtcaatagcatcttcataagctgatgggagacgactctctggagctaatcgatactcgacagacagaattacagcaggtaattcactagccaaacgcacgcaaaactcatggtaaggtaatgatgcagaactgaagacaatgaaaccgcccccatgaaagtaaattatgataggaagtttagaattgtttgaaggaagattggaagggaggaagattctgatccatgtgttcttgtcggtgtttagagggacatctatggaa

SEQ ID NO: 311 - DNA, 1119 bp, Stylophorum diphyllum
taagctgcataaagatttggatttcagaccaaaaaacagacatacagatttggaattttattgagttacaaatttacaatacatggagtcaatcctaagacccaacccattttatgccctaattgaatcagcttagacatcattttatgccctaatgaaatctttcactaccttaaacatttcttcagcatgtttctgatcagaatgcacctttccatgacatccttcctcttcaatccaactcacaactttcacacctttcctttccaacatcttcccaattaccaaacacctctttatcatcaaccaattaatggtgctagtcccaccattgttctcaaccatcatcggattactataaaaatgatcacgatcagccccaatcggtaaacccaattcccaaaacaaatcactcataacaatagaaatcaccttatcattaatcaatctcaactccgatccagttctctctaccccaccaaaaaaaggctggttcaaaataagcccagtaatcttaattggttccagatccaattctaatgatcttaaacaagcatgatatgcaatgttaccacctgcactctcccccataataaaacagtttgagaaatcaccatactccctcaaccattcctcactattaataacatccaaagcttggtctcgaacccaatttagtgcgtcgacggagtcgtcgtaggcggcgggaagtctgctttcgggtgcgagacggtactctactgagattaccaaagctgatgattggatcgccattgacttgcagaaatcgtggaagatagttgaggatggactgcaaatgatgaacccaccaccatgaaaataaattatgacaggaatcttcttgttttgatcatcttgaaattgggttttggtgggtctgaagattcttatccaagttttgtgttgagggttgagagggatatctttgcagtttggatcatctgatgaaggggtatctgggatggggagattacgggttagtgtgtcatctggattgtgaacgatattgagagcttcataaggattaatggtggtggatgattgatccgccattgttagaggcttatagctaggtgggtttattggtggaagagattc

SEQ ID NO: 312 - DNA, 1251 bp, Tinospora cordifolia
atgctagacagtagcacgagaacagcaaattgtatatgtgtaagcaataataacaaggtctaagtacctcatttttcgtaaataaaatgtttgatttttaccagcaactcggaagccttctcacaatccgatagctcgaccccatgatacccttcttcctcaaaccaacactttaccttccctcccttttcctctatcatcttcacaagttccatctgcctgtccctcaacatgtctccgccacgtacacataccaaaaacctccccaactgtccgatcttctccccataatcaccaaccatcggattacaatactcatgatcacggtcagctgctttcggcaacgacaactcccacatgacgtcagtcatgcccacagtaaaattttcatcgtttcccagtctcatctctgatgcagttctttgtaccccaccgaaatacggctgaatcaatattatccctacgatcttcaacggatccagatctaaatgtaggcttcgcaagctcgcatgatacgcgatgttgcctcccgcactcaaccccatcagataacacgtgggaaagtcaacctgttctctcagccatacgtcctccagatcatgacccttatcatcacctgcaaccagcgcctgttctcgaacccagtggatggcgtcgacggcgtcatcgtaggccgccggaagccggctttcgggggcaagacggtactccacggagagaacgacggcgggtagctcgacggcgacgcgagagcagaagtcgtggaacatagtgttggctgcactcatgaagatgaagccgccgccgtggaagtatattatgagaggtagcttctttgatggcggtgggccggtcggcaggaagagccgcagccaagtgtgatagctggagttaagaggaaggtctttggtgagaacgggttggctggagactgccggagagtggtggtgatcgtcgtcggtgttggttgggttggtgcagggtacggtgaagagacgagtgagggtgtcggtttctgggttgtagatgatcttcaaggatttaaaaaagtcggttgggttgattgatgggacatcatcatgatcttccatgtttcgaagaggaaaagatgctgaagaatcagaaacagagaattctcagacaactccaactcttgaacaatagaattatatgttccagtgccatgacaacgcaacaaacttgacctttagttgctagacatcaatcttttgttgctaaaactttttagca

SEQ ID NO: 313 - DNA, 1251 bp, Tinospora cordifolia
atgctagacagtagcacgagaacagcaaattgtatatgtgtaagcaataataacaaggtctaagtacctcatttttcgtaaataaaatgtttgatttttaccagcaactcggaagccttctcacaatccgatagctcgaccccatgatacccttcttcctcaaaccaacactttaccttccctcccttttcctctatcatcttcacaagttccatctgcctgtccctcaacatgtctccgccacgtacacataccaaaaacctccccaactgtccgatcttctccccataatcaccaaccatcggattacaatactcatgatcacggtcagctcctttcggcaacgcgtactcccacatcgcgtcactcatgtccaacgtaaacattccatcattccccaatctcatctccgacccacttctctgtaccccactaaaaaatggttgaatcaataccatccctacgatcttcaccggctccagatctagcggtaagcatcgcaagctcgcatggtatgcgatgttgcctcctgcacttaaccccatgagataacacgtggaaaagtcaacgtattctctcagccatacgttcttaagatcgtgagccttatcatcacccacaaccagcgcctgctcccgaacccagtagatggcgtcgatggcgtcgtcgtaggccgccggaagccggctttcaggggcaagccggtagtctacagaaatgacgacggccggtagctcgacggcgacgcgagagcagaagtcgtggaacatagtgttggctgcgctcaggaagacgaagccgccgccgtggaagtatattatgagaggtagcttctttgatggcggtgggccggtcggcaggaagagccgcagccaagtgtgatagctggagttaagaggaaggtctttggtgagaacgggttggctggagactgccggagagtggtggtgatcgtcgtcggtgttggttgggttggtgcagggtacggtgaagagacgagtgagggtgtcggtttctgggttgtagatgatcttcaaggatttaaaaaagtcggttgggttgattgatgggacatcatcatgatcttccatgtttcgaagaggaaaagatgctgaagaatcagaaacagagaattctcagacaactccaactcttgaacaatagaattatatgttccagtgccatgacaacgcaacaaacttgacctttagttgctagacatcaatcttttgttgctaaaactttttagca

SEQ ID NO: 314 - DNA, 1357 bp, Tinospora cordifolia
ccgattcaattgctagaatatgacgattagatactccacaatttttaatttacacattcactttcacagactcgaaggaaaaattaatacgtaaataggaaatacatatcctaactatgtattttcttactcactaaatgttgagaatatgaaatcctttaaggctacaagcagtgaatccaatttatgggaattatttaagagttcctcgccatgatgatctccttcaacgattctacccttcacttttacacctttttctttcatcgtcgtcaacaatccaatctgacgatcaattccgggatccttatctccagtagacatcagtatcttccaacccaacattttgatcttgtcgaatagttttgacctatccactaccgctggattagaatactcatgatcacgattagctccagccggcaaagagtacttccacatcacatcagttgcaataagaggcagaatgaggtcgtttgccattcttaactcagattcagttctttcatgcccaccaaaaaagggataatgcaatatcaatccattgatcttcaacggcttaaaactgtcaacatcttccattgccacacgtaaaccgacatggtacgctatgttccctccagcgctgcaacccatgatgaagcaattagaaagattagcatggtctctcaaccaagaatcctccgcgaattttatccagttcaaagcttcgactgcatcatcgtacgctgccggcaggagatgctcgggtccaacacggtagtcaatagagacaacaacagcagatagttgtaaagcgagtttggagcaaaagttataacatgtgggtgtggccgtagtggagataacaaaccctccaccagggtagtatacgatgagagggagtagatcattcgtggagttagactcgagcttatatcgagaaatatatacacgagcccaagtattgtttgattggttgatcgggatatctttggagagaaccggagcggggtagctcagatcaggtacggttggcacagtcggaaaattgctgggtttttttcttgtgattgtgccgtcatggtggtgtacgagatcgacgtagtcgtagggatcggtgattggaacaggggtgaaaggcgctacttgatcggacatgatgagaaatgttcaacagaggtacttgatcatctcttatcttcctacggtgtgtaaattagcatatatggagaggcaagactgcaatttaatttaatgcttggtagggttgggcaattaatttggtgttttcacaagtcgccgtcgatcgagactaattgctactaaaggaagatattttttgtatggctgatagctatctcctccctaacctcct

SEQ ID NO: 315 - DNA, 1690 bp, Thalictrum flavum
atgaacaaaacttaatatgtagacatcttatatatatattatatattatattctaaaacaaagtataagatacaagatcacactaacatggatgtttccccatcctgttttgacactacactactacgacccataacccattacattaaccgtaaaccctatactaaagacttctcagttcatggccaaaagttggagagggtaacctacagaggactgccaacctgttatcaaactgctcttgccgtgagtaacagactcccaaagcggggcttctaagtccagacaactgggctcattacacaaacaacgaaagaatgagttcagctcgaaccgtccaactgaactcattggattaagtctttcctaataagatatacttttctgcatccaggattctaaatacttgctattgctacacgaagaacaatcaccaaggatgcagaccttataacccttagtaccatagacaattaagttaagtaataagtctactacacacccttatggccttgtacactgcacactgctgcctcttaagaacaaaataaacccgtgtgaaatgtcatcaaacttctgttatgtatggctgcttgtatgtaaagtaagtctattgacagttagcaactcaggaagttgtttatctcatccatgaggctgaagaagtgaatgttattcggcaacaagtagaacccaatggtggcttgttccagaaacatcaatttgacatcttgcccagccctctggagtccttggacgtaagccaattgccaatcgtggagtaggtccaaccctgcaactacaacgaggcttttagggaacttaacaccttcaaggcttgcagcattgggaccaaacggattacatgcaggatgtgttctgtctgctccttgagggagaaaagccctccagtaccaatctcggtcttggagggtcacgaagtatttcccatctaatttcttctccgattctgttcgttctaccccaccaaacatgggattaagtagtatattccccagtacctcggtcccggattctactgctctcagtgcaacatgatgggcaatattacccccagaactatctccggcaaggtacacatgagcctttgagtccttcccactccgcagccatggccttgaatgaacccatttaagtgctgcctggccatcatcataagcacatggataccggtattcaggtgcacgtcgataatttacagagaccacaacagctttgctgttgcgcacaagacgacggcatagtgtgtcatagatagcactattagcagaagagtgagcaaagcttcctccatggaagaaaattataactggaacaactacatcactgcttaagggctgttcaagctgaaggaagcttggtcgaccttcagtcgccaaggcctgtcgataaactctgcaaaggagatcagtagccctgtcgatgattacatcgaacgagaaaaccccatcaactgggttcgcattggaaggaactttccgatcaaggaactctgccagatgacgattgaaggtcccatcgggacgacgaagcatggtgtatgccagcttgaaattggagatgagaacccatgtgtttaaaggaaccgccaactaatcacacatcaagaaaatcaataataagtttcaattacaagatcaaaacttcaaattaagaaatttatagtcct

SEQ ID NO: 316 - DNA, 1227 bp, Xanthoriza simplicissima
atttttttcccactactataaatatcactatatacattgaagcaaggtgagaaaataaaaacatttcatagatattcttctaacacagttttcttatccatattccggtaacatggcagaacagaatccatccattttacctataaatccttatgaagtactaggtattgtccacaaccccgacgacacgctaactcgacaaatccaaatcccatgcactactacttctacagatgatatttcctgtgccaaaatcaccaaagacatccctctcaacgcttgtaacaaaacatggctaagattgtttaggccaattgaacaacctgttaacgtaaaacttcctattatactttacttccgtggtggtggtttcatactgtgtagtgcttccaatactatttttcataatttctgtgcttccatggcaaataaatttccagccttaattgtttcagttgattaccgcttagcgcctgaaagccgccttccatcagcctatgaagacgcaattgaagcaatcacttgggttaaaaaacaagccttagatacgaatggtgagcaatggttcaaagacttggctgatttttccaagtgttatcttatgggatgtagctcaggaggcaacattgtgtaccatgtaggtttacgcgctatatctttggatcttaagcctttgttaatcaaaggacttatattgaatcaaccttttttcggagggttgagaaggacagagtctgaaatgaggatggtgaatgacaaaaccttgcctttggttgtgagtgatttgatgtgggaattggctttgccagcaggatctgatcgcgatcatgagtattgtaatccaagggttgatggaggttttaaagaaaatatcaaattgctttcgagatgttttgtgagtgtgcgcggtggagaccctttgatggaccatcagaaggagtttgtgaaaatggtggaggaggaaggtgtgaaggttgtgaactggtttgatgaagcagggtaccatggaatggaactctttgaaccacaaaaagctgaggccatgtttgtggctctcaaagcttttatttattcttctagtgatattgaatagatgtctttgctggtgatagaagctgcaacgttgaatggttttaagttacaaagactcgagtgattttctttaatacaatgatattgaatgtagatcttataggtaagtaacatatttggaaaatcaatgcaaag

SEQ ID NO: 317 - DNA, 1246 bp, Xanthoriza simplicissima
accatcgatataatacgcgctcacaaaaaggctgtataacataatcaccagttcaccactagtattttcattatcttcaacacaacgtcatctctgtatacaatatcaataacatggcaagtcaagcagatcaagcacacgttgatcgatacaaagaacacaacatcatctacaatccagatgacactctcactagactcatcactttcccttgtactagtacaacagatcacaattcccttccaaatcaacctgtttttacccaagacatccctctcaacccaattaataaaacctggatgagactcttcaaacccagtaatccacaacctcctaaaacaaaactccctctaatactttatttccatggtagtggcttcataatcggtagtgcttctaattccacgttccatgacttttgcacttcaatggcaattgaactatcttgtgtcgtcctctcattaggataccgtcttgccccagaaagtcgactcccagctgcttatgaagacgcgatggaagcaatagattgggttcgaaacaaagcactagatttgggcagtgataattgtttgaaggaagtcgttgacttctcaaaatgctatctcatgggcattagttcaggtggaaacatggtgtatcatgcaggtctgcgcgtgttgtcaatggatcttcatcctatgattataaaaggattgatattgaaccatccattttttggcgggttgaaaaggactaattcagaattgagattggctaacgataagttctcattagcttttaccgatataatgtgggagttatcgttgccaaaagtgttcgaccgcgatcatgagtactgcaatccaatggttgaagggagtaacaaggataagattggattgcttggaaggtgttttgtgagtgggtgtggtggggatattttgatagaccgtcagatggagtttgctaagatgttggaggaaaaaggtgcgagtgttgtgacatggtttgaggaagaagggtgccatggagtggagctttttgaaccagagaaaacaagggccttgttttttcttctgaaagaatttatatctggtcagtaatttttgttctctagcatgctacaaaatgagaagcatttgagtgtactgaaaaaataaattgctcctgttttcgtttgtatattcaaataaggattaaccatatcccattctccattggcggagaatttttttttatatttatgaactaatataattttatg

SEQ ID NO: 318 - DNA, 1273 bp, Xanthoriza simplicissima
gattcaattaagtcagcaaaaagcttccacagaatcctcatttccgttcctctttaaaactatcaaaatcacacaataccttctcaatcacactatcatagattcataacaacccaagatctaacaatcatggcagatcaaaatacaattatagatccatacaaacatatcaatgtagttcttaaccctgatggcacacttactagaccaactctagttccaatcatcccaccatcaagtgatcccaattccaactctgttatctccctagacattcctctaaatccctctaaaagcacttggatgagagtttttcaacccccaatctttcttgcaatcaaaaactacctctcatcatttatttccatggtggtggttttgttctttatagtgcatcatctagaccattccatgaatcttgtgttaaaatggctagtgaattaccagctataattatttcagttgattatagtcttgcacctgaaaacaaacttccttctgcttatgaagatggtatggaagcattgctttgggtcaacaaccaggctataaatggtgagtttgagttctgtaaatttgtagatttttccaagtgttttatcatgggaagcagtagtggtgctaatattacttatcaagtgggtttaagagccttaaagttagatcttgaaccagttaagattattgggcttatcatgaaccaaccattttttggtgggattcaaagaactggttctgaattaagaatggtgaatgatagaataattcctctagtagttgctgatttgatgtgggaattagctttgcctattggtgctgataaggatcacgagtattgtaacccaatggcggcccattttaatgagatcaaacagttgccaaggtgttttgtgaatgggtatggtggtgatccgctggttgatcgtcagaaagaatttgccaagatgttaggggagcatggggcttgtcttgtggaacattattctgatgatggttttcatgcttgtgaattgtttatccctgataaggctcaggctttggtgatgaacattagagatttcatttactctcctggtattggctccaacgctgctacgtcaactttgtgagtttttgccttttggggatatgactatgagaacttacctttgcatcttctattgtatgtgcttaataattggtatgacgaaacaaatgatatgctttttggtttttatagggtaggagtttcgggaaaaacttatattatcccctctctcgttttctttttatc

SEQ ID NO: 319 - protein, 349 aa, Argemone mexicana
MAENNSSIITTNVTNPYEYLKIVHNSEDDTLTRLDPVPITNPITNVQNCKDIPLNIQHKTWIRLFKPPQLQQQKSSKKDDEFSKSLSNNQSFPLIIYFHGGGFIMNSAASNYEHVFCEFVTTRIPAFIASVEYRLAPENRLPAAYDDAVEALNWVKNQALDTINGEQWLRNFVDFSKCFIMGCSAGGNIAYHACLRTLELDLEPIKISGFILNQPYFGGLRRTESELRLINNWMLPLVINDLMWELSLPIGANRDHVYCNPMVDIDNSSSTILGLVKKLGLIRMKCLVIGCDGDPLIDRQIEFVKLLKEKGVMVESCIEEGGFHGVGFSCPEKTDELCVKLKDFILGTY

SEQ ID NO: 320 - protein, 326 aa, Berberis thunbergii
VDQSQSQTPINPYNLLGLVHNSDDTLTRLISPTCRYEDDQSIIQDIPLNTAHKTWLRLFKPIESPRITNGDKLPIILYFHGGGFILCSAAQTIFHDFCTSLANKLPAFILSVEYRLAPESRLPAAYNDAVQAINWVRDQALNLNGEPLLREFGDFSKCFLMGCSSGGNIVYHAGLQALDLDIEPLKIRGLVLNQPFFGGTQRTKSELRLVDDKILPLSMSDMMWELALPRRVDRDHKYCNPMIHGDDDKKNGLIKRCFVSVRSGDPLMDHQMEFVRMLERKGVHVVRWFDDNEKEGYHGIELYEPQKAEVLFAALIDFVYSSEATE

SEQ ID NO: 321 - protein, 257 aa, Chelidonium majus
MLPIIIYFHGGGFILFNADSTMNHDFCQSIATHIPALVVSVDYRLAPENRLPAAYDDAVDALNWVKDQGLGKLNNSEVWLKEYGDFSKCFIMGCSSGANVAYHASLRAIEMDLEPAKINGLILHCPFFGSLERTESDSKVINNQDLPLAVRDVMWELALPLGSTRDHVYCNPNIDHDGSSSGNMVGLIERCFVVGFYGDPLIDRQIQLVKMLEEKGVKVETWIEQGGYHGVLCFDPMIRETFLEKLKHFILNDEFIY

SEQ ID NO: 322 - protein, 320 aa, Cissampelos mucronata
MDPYKFLSISPNPDGSLTRHTRIPTSPPTNNPTVASADFPLNPSNNTWFRLYKPTNTPTSAKVPIVIYFHEGGFVLFSAASQPFHDCCAALASQLQALVMSVEYRLAPEHRLPCAYDDAIDAIAWVRGQALGGGNGWFGDSVDFSRCFLMGSSSGGNIVYKAGLMSLEKGLIGGGAEHVKLVGLIMNQPFFGGVERTDSELRYADDRILPLPAGDLLWELALPTGSDRDHEFCNPLKGVSGEIERLPRCFVNGYCRDPLIDRQRQFAKMLERNGVSVVERFVDDGFHACELFDPDKARALALAIKDFIYDCGAGGAKSAL

SEQ ID NO: 323 - protein, 354 aa, Cissampelos mucronata
MRNKRMAALSFDNARLGHQVGQDHRQKPGVLIEEIDGLIRVYKDGHVERPPVVPNVDCIAYIESSLTCRDVIIDKFTNVWARFYVPRTQGTKLPFLVYFHGGGFCVGSAAWSCYHEFLTKVATKAGCVIMSVNYRLSPEHRLPTAYEDGVGALMWVRREILRGSSEQKWWWSHCNFSQVFIVGDSAGANIAHHVTTRVGQLGASSDEPNILSPMTLKGTILIQPFFGGEARTHSEKYMAQPPKSALTVAASDVYWRLSLPLGASRDHRWCNPIAKGAMDLEELRVPPIMVCISELDILKDRNLEFCSAMKRAGKRVEHVVYMGVGHAFQVLNHSQLSQARAHEMMSHIKAFINR

SEQ ID NO: 324 - protein, 344 aa, Cocculus trilobus
MAGSNAVNESQRAVPLNTWILISNFKVAYNLLRRPDGTFNRHLAEFLDRKVPANVIPVEGVFSFDCFIDRATGLLSRIYRPAPADEAEILPGVIDLERPLSTEVVPVIIFFHGGSFAHSSANSAIYDTLCRRLVRNCKAVVVSVNYRRAPENRYPCAYDDGWAALKWVHSRPWLRSGEDSKVHVYLAGDSSGGNIAHHVAMRAVEAGTEVMGNILLNPMFGGMDRTESEKRLDGRYFVTIQDRDWYWRAFLPEGTDRDHPACNPFGPKGADLKGVKFPKSLVVVAGLDLVQDWQLAYVEGLEKAEQEVKLIYLERATIGFYLLPNNDHFYSVMNEINKFVNSNC

SEQ ID NO: 325 - protein, 361 aa, Eschscholzia californica
PQLLILTTYFKIIIKLKYFFNLSSLSTMEDKSSSLISNINPYEALQLVYDAQADSLTCNLPVPTIESSGDPNCKDIPLNIEKKTWVRIFRPTTITTPTTTSVTTATTTTNKLPIIIYFHGGGFILFSAASGMFHDFCKSMAAQVQALVVSVEYRLAPEKRLPAAYDDATDAINWVRNQAMDPVNGEPWLRDYADFSKCFLMGCSAGANISYHVGLKACELDLEPIKISGLILNQPFFGGSKRTESEIRLRDDQILSNPVIDLMWKLSLPIGVDQDHVYSNPMANNGGGNVKVIKRIFVNGCDGDPLFDRQVEFVKMLEDKGLKVEASMEEGGFHGMTFLDPKQTDFFCKKLKDFIFLSQVV

SEQ ID NO: 326 - protein, 352 aa, Glaucium flavum
MQSSSPQIKNTNKTRKNPNPTMADQPPTTINPYEALKIVHNPDDTLTRNLPIPDTPSSDDPNCKDTSLNPQHKTWIRIFRPTKTQSQDNDFSITNKLPIIVYFHGGGFILCSAFSTIFHDFCKNMATQLPALVLSVEYRLAPESRLPAAYDDAVDALNWVRNQALETANGEEWLRDYADFSNCFIMGCSAGGNIAYHTGTRALELDLEPIKISGLILNQPYFGGVERTGSELRLINDKALPLAMNDMMWELGLPIGADRDHFYCNPMVKIDGESGTRDEGKLGLRMIRCLTIAGYDDPLFDRQIELGKMLEGKGVKVVRFIDKEGYHGMVHFDQKKAEEMFVAVKDFISSTN

SEQ ID NO: 327 - protein, 317 aa, Hydrastis canadensis
MADQNSSVEPIDPYKFLNIIYNPSDDTLTRNNHFPSTPITPDVKNAKDISLNTTKKTWVRLFRPNEPSLNRKLPIIVYSHGGGFILQSASDTVFHNFCASMANILPALVVSIEYRLAPESRLPGAYEDTIEAINWVKNQALDMNGEQWLKDFADFSNCYLMGSSAGGNIVYHAGLRALSLDLDPLIIKGFILNSPFFGGSKRTESELRLINDTLLPLAVNDLMWELSLPKGCDRGHEYCNPMVDSSYKQNIGLIEKCFVSVGGEDPLMDREMEFVKMLKEKGVKVVVWFDKEGLHGMEITVPGKDQALFVLLKSFVY

SEQ ID NO: 328 - protein, 330 aa, Hydrastis canadensis
MANPNPVTIDPFKQLIITLNPDGTLTRPTLVPIVPPTGEINSHSKTPSVISMDVPLNPSKNTWIRVFQPSNLSSNSKHPLIIYFHGGGFVLYSAASKPFHESCCQMASELSAVILSIEYLLAPENKLPSAYEDAEDAMLWVKKQALNCEYKFCEFVDFSKCFIMGSSSGGNITYQAGFRALKLDLEPITINGVIMNQPFFGGVERTESELRLINDRILPLPTCDLMWEFALPIGSNRDHEYCNPIGSHHNEIKWLPRCYVRGYGGDPLIDRQMKFVKMLEDHGACVVKHFLDDGFHACELFDPKMAEALYVDLRDFIYSSESNAVVKSKY

SEQ ID NO: 329 - protein, 325 aa, Jeffersonia diphylla
MDPYDALNFILNPDGSITRLDSSVPTTPPTGYDYNDSSVASIDVPLNTTTNTWIRIFHPLNLPSDTKLPIIVYFHGGGFLLFSAASLTLHDFCVHLAGETPALVLSVDYRLAPENRLPAAYEDAVDAVLWLKQQALHGEHKFTTFVDFTQCFIMGSSSGGNIAYHAGLRALNLNISPVEIRGLILNIPFFGGVERTESELKCVDDPILPLPVADLMWELALPVGTDRDHEYSNPMVEGSNQKDIQRLPTCYVNGYEMDPLVDREKQLVEKLKGHGVCVVEHFFDDADAYHAVEFFDPDKGRALVMDLKDFIYSPVTAASVDKPIE

SEQ ID NO: 330 - protein, 329 aa, Menispermum canadense
MENQQPPLLNTTDPYETLKIVYNANDDTLTRLYPIPCTAATGDHHNLPIITKDICLNTTHKTWLRLFIPTEPPPSPNSLPLIIYFHGGGFVLCSAANTLFHDFCARIAADLPAVVASVEYRLAPERRLPAAYEDAVEAVNWVREHGIKEKWTRDFVDFSKCYLMGNSSGGNIAYRAGLRCGSLDLEPVKIVGLVLIQPYFGGVERSESEMRLANDGHFPLVVNDLMWELALPRGADRDHEYCNPMVAGAQWEKIGKCFVSVRGGDPVMDRQIALARRLEGEGVKVESWFEEEGYHGIELFDPVKASELLLKLKHFICPPEAAEYRVVEK

SEQ ID NO: 331 - protein, 333 aa, Menispermum canadense
MDDPYKFLNIVPNPDGSLTRLTQIPTSPPSHHPEATSNKSINSSLNDHSVISMDFSLNPATNTWLRLFRPNTTTPQHVKLPIIIYFHGGGFVLFSAASQPFHDSCAAMAADLPALVLSVEYRLAPEHRLPAAFHDAVDAIVWVKQKALEQHWLCDLADFSKCFLMGSSSGGNIAYHAGLRALGLDLGPVKVSGLILNQPFFGGVVRTESELRLAGDRILPLPAGDLMWELALPVGSDRDHEYCNPIMKDSNGGDIERLPRCFVNGYGGDPLVDRQKEFVKMLEQCGVSEVARFVDDGYHAVELFDQSKAKDLVMAIRAFIYTTSATTTPKSTL

SEQ ID NO: 332 - protein, 327 aa, Menispermum canadense
SDLRDPSVIDEPYQFLKIALNPDGSLTRGYEFPRVPPTPELASESANLSSRRQPALSKDIPLNTSNQTFLRLFRPLHHSKKLPIIIDFHGGGFVILSAISAPFHDMLSRAAAFAPALIITVEYRLAPEHRLPAAYDDAMEAIMWVRDQAREINGCDPWMKELADYSNVHIMGTSAGGNIAYQAGLRALDVDINPVQIRGLILNQPFFGGIQRTQSEEILSRNPYLPMAVSDLLWVLSLPPGSDRDHEYSNPLDGVNQKIQCLPRCLIRGFAGDALVDRIKGLAKMLDAHGVKVVVKIEDGGFHGAEMADPSKVQELFLQIKDFVYSS

SEQ ID NO: 333 - protein, 268 aa, Nandina domestica
PIQQTLSNSGELKLPLVLYFRGGGFILCSVANTFFHNFCTSLATNLPALILSVEYRLAPESRLPAAYDDVIEAINWVRNQGLDMHGGEEWLRKYGDFSKFFLMGCSSGGNMAYHAGMHALGLDIKPLKIQGLILNQPFFGGTKRTESELRLVNDQKIPLAVSDLMWELALPKGVDRDHKYSNPMVHDDDDDQEKIELMKGCSWFVSMRGGDPLMDRQMEFVRMLEKKDVKVVKWFDDEGYHGMELFEPQKAEELLVALKNFIRSEALE

SEQ ID NO: 334 - protein, 323 aa, Nandina Domestica
MDPFKVLNLIPNPDGSFTRPPIFPYAPPTGYTDSTPPQNVATIDVPLNSMKNTWIRIFHPLNLPSVSTKLPVILYFPGSGFVMDTARILPLNEFCIQIAGELPVVILSVQYRLAPENRLPSAYEDAVDAMLWLKQQALHGEHKFIDSADFTKCYIMGSSSGGNMAYQAGLRALNLDLEPVRINGLIMNQPFFGGVERTGSEMKYENDKVLPLLATDSMWELSLPIGADRDHEYCSPMVQVWDLVQIQKLPKCYVNGHGGDLLVDRQKEFVKMLEGQGVSVIAHFFDDGCHAVELFDQEKAQALYMDLKEFIYSSTTGDGAHGS

SEQ ID NO: 335 - protein, 320 aa, Nigella sativa
MADENPNSVALDPYKVINIVLNPDGSLTRPTQVPNLPTSDDPKSVISLDIPLNPSNKTWMRVFQPPNLSSNQKLPLIIYFHGGGFILYSPSSRPFHVSCIQMATQLPAIILSVDYRLAPENKLPSAYDDAVDALLWVKNNAMKGEYKFWEFIDLSKCFIMGSSSGANITYHVGLKALVLDLEPVKIKGLIMNQPFFGGIQRTGSELRFVNDKVVPLVVADLMWEFCLPVGADRDHQYCNPMAEGGSEEEEIKELPRCYVRGHDGDPLIDRQKEFVEMLEGRGVSVVKDFSDDGFHACELFDATKGQELIEKVKEFIYSSS

SEQ ID NO: 336 - protein, 325 aa, Nigella sativa
MADENPNSVALDPYKVINIVLNPDGSLTRPTQVPNLPTSDDPKSVISLDIPLNPSNKTWMRVFQPPNLSSNQKLPLIIYFHGGGFILYSPSSRPFHVSCIQMATQLPAIILSVDYRLAPENKLPSAYDDAVDALLWVKNNAMKGEYKFWEFIDLSKCFIMGSSSGANITYHVGLKALVLDLEPVKIKGLIMNQPFFGGIQRTGSELRFVNDKVVPLVVADLMWEFCLPVGADRDHQYCNPMKGSQNQEIKRLPRCFVRGYGGDPLIDRQKEFVKMLEEEGASVIKYFLEDGFHACELFFPDKAQALYVDLKDFIYSSPETNKSTL

SEQ ID NO: 337 - protein, 321 aa, Nigella sativa
MAAQNQNSTINPFEALSIVLNANGSLTRHPHPLSTLSLNTTKSVVCTDIPLNPNRNTSIRIFQPPIHPTTPKIPLIIYFHGGGFLIFSAKSPPYSEFCLQIASELPALVLSVGYSLAPEDRLPSAYEDALDAVVWVKNHAFKGEYKYDFFDYVDFSKCFIMGSSSGGNITYQLGLQALKLNLEPFRINGLIMIQPFFGKVERSGSELRLANDNILPLPVTDLMWELSLPVGADRDHQYCNPMAEGGSEEEEIKELPRCYVRGHDGDPLIDRQKEFVEMLEGRGVSVVKDFSDDGFHACELFDATKGQELIEKVKEFIYSSS

SEQ ID NO: 338 - protein, 326 aa, Nigella sativa
MAAQNQNSTINPFEALSIVLNANGSLTRHPHPLSTLSLNTTKSVVCTDIPLNPNRNTSIRIFQPPIHPTTPKIPLIIYFHGGGFLIFSAKSPPYSEFCLQIASELPALVLSVGYSLAPEDRLPSAYEDALDAVVWVKNHAFKGEYKYDFFDYVDFSKCFIMGSSSGGNITYQLGLQALKLNLEPFRINGLIMIQPFFGKVERSGSELRLANDNILPLPVTDLMWELSLPVGADRDHQYCNPMKGSQNQEIKRLPRCFVRGYGGDPLIDRQKEFVKMLEEEGASVIKYFLEDGFHACELFFPDKAQALYVDLKDFIYSSPETNKSTL

SEQ ID NO: 339 - protein, 315 aa, Nigella sativa
MDTFKQLSITYNPDDDTIDRLVTIPCTTTNHHNSLPNQQIFTHDIPLNSSHKTSLRLYKPINPPLHAKLPLVVFIHGGGFLFASPFNTIYNDFCTSMAISLGVVVLSVGYRLAPESRLPAAYEDALEALTWVRDQADNILLKDMVDFSNCYLMGDSAGGNIVYHAGLRALSINLEPLVIKGYIFIQPFFGGMKRTESEVRLADDKILSSVVSDLLWELGLPKGSDRDHEYCNPMVGGGFSDKIELLTRCFLVALGGDLLVDRQKEFMKMLEEKGVEVVSWFEDEGCHGMFLFEPEKALHLFEVIKDFIYQPMPTV

SEQ ID NO: 340 - protein, 330 aa, Papaver bracteatum
MADQHSTTTSSTIDPYEALMVVHDPDLDTLTRNLPLQITNTTDDPNSKDILLNAQHNTWIRIFKPTIQDLPTANKLPVIIYYHGGGFILCSTFWTIYHDYCKSKANALPAIVLSVEYRLAPESRLPAAYDDAVDALNWVKHQASGGKPSEPWLRDYADFTNCYIMGESAGGNIAYNVSLRASELDLSPLKISGVILNQPFLGGIERTSSELRLINDKILSLPVSDLMWELSLPIGSNRNHPYCNLLINEDDESLRKKCGFIKKCLVIGCDGDPLIDRQVEFVKMLEGKGVKVETFMQEGGYHGMVYFEPEELEIMLPRVKDFILSGASKL

SEQ ID NO: 341 - protein, 324 aa, Papaver bracteatum
MADQHSIDPYEALMVVHDPDLDTLTRNLPLQITNTTDDPNSKDILLNAQHNTWIRIFKPTIQDLPTANKLPVIIYYHGGGFILCSTFWTIYHDYCKSKANALPAIVLSVEYRLAPESRLPAAYDDAVDALNWVKHQASGGKPSEPWLRDYADFTNCYIMGESAGGNIAYNVSLRASELDLGPVNITGVILNQPFMGGIERTSSELRLINDKILSLPVSDLMWELSLPIGSNRNHPYCNLLINEDDESLRKKCGFIKKCLVIGCDGDPLIDRQVEFVKMLEGKGVKVETFMQEGGYHGMVYFEPEELEIMLPRVKDFILSGASKL

SEQ ID NO: 342 - protein, 247 aa, Papaver bracteatum
MIVYFHGGGFILCNANSTIFHNFCKSMANQLSAIVLSVEYRLAPENRLPAAYEDAVESLVWVQNQALDAINGEPWLRNYGDFSKCFIMGCSAGGNIAYNSCLGASELDLEPIKICGLILNQPYFGGVERSKSELRLVNDKCLPSVVNDLMWELGLPVGVNRDHVYCNPFVDENLETKLRFIRRCLVTCSNEDPLVDRDIQFVKMLEGKGVKVVSWIEEFGFHGMAHSDPVKAQELLKVVKDFIFSED

SEQ ID NO: 343 - protein, 351 aa, Sanguinaria canadensis
DHHQLSQLAASVNYSIDPYDRLKIVHNSDDDSLIRLVPLPSYPSTDDDDQNSCKDILLNPQHKTSIRIFRPTTTQFQQSSKKYDFSVKNKLPPIIYFHGGGFILGSAFNIVFHDYCKSMATQLPALVLSVEYRLAPENRLPAAYDDAMDAVNWVRNQALDAINGEPWLRDYADFSKCFLMGFSAGGNIAYHAGLRALELDLEPIKISGLILNQPYFGGSKRTRSELRLTNDPILPCPMSDLMWELALPRGANRDHMYCNPMVDDVTRRGNRNKVGLVIRRCLMAGCDGDPLIDRQIEFVKMLEGKGVKVETWMEEGGSHGMVFADPKKAEILFGKLKDFIFTDIVTKGAAN

SEQ ID NO: 344 - protein, 299 aa, Sanguinaria canadensis
SIDVPLNTDKNTWIRIFLPSNLPSNNSKLPIIIYFHGGGFIVFSSASLPYHEFCVRLASELPAVILSVEYRLAPESRLPSAYEDAIDAINWLKKQALNGGEHKFVDFVEFTGCFLMGSSSGGNIAYQAGLRVADLDIEPVKINGLILNQPFFGGVERTGSELRYANDEILPLPVSDLMWEFALPIGANRNHEYCNPMVEKSHYCKIRMLPRCLINGNGRDPLVDHQKEFVKMLERNGVCVVAHFADDGSHAVELFDPEMARALVTNVRKFIYSSATDVGVSTTGAAKSSIPIDRLLFCK

SEQ ID NO: 345 - protein, 324 aa, Stylophorum diphyllum
ESLPPINPPSYKPLTMADQSSTTINPYEALNIVHNPDDTLTRNLPIPDTPSSDDPNCKDIPLNPQHKTWIRIFRPTKTQFQDDQNKKIPVIIYFHGGGFIICSPSSTIFHDFCKSMAIQSSALVISVEYRLAPESRLPAAYDDSVDALNWVRDQALDVINSEEWLREYGDFSNCFIMGESAGGNIAYHACLRSLELDLEPIKITGLILNQPFFGGVERTGSELRLINDKVISIVMSDLFWELGLPIGADRDHFYSNPMMVENNGGTSTINWLMIKRCLVIGKMLERKGVKVVSWIEEEGCHGKVHSDQKHAEEMFKVVKDFIRA

SEQ ID NO: 346 - protein, 340 aa, Tinospora cordifolia
MEDHDDVPSINPTDFFKSLKIIYNPETDTLTRLFTVPCTNPTNTDDDHHHSPAVSSQPVLTKDLPLNSSYHTWLRLFLPTGPPPSKKLPLIIYFHGGGFIFMSAANTMFHDFCSRVAVELPAVVLSVEYRLAPESRLPAAYDDAVDAIHWVREQALVAGDDKGHDLEDVWLREQVDFPTCYLMGLSAGGNIAYHASLRSLHLDLDPLKIVGIILIQPYFGGVQRTASEMRLGNDENFTVGMTDVMWELSLPKAADRDHEYCNPMVGDYGEKIGQLGRFLVCVRGGDMLRDRQMELVKMIEEKGGKVKCWFEEEGYHGVELSDCEKASELLVKIKHFIYEK

SEQ ID NO: 347 - protein, 340 aa, Tinospora cordifolia
MEDHDDVPSINPTDFFKSLKIIYNPETDTLTRLFTVPCTNPTNTDDDHHHSPAVSSQPVLTKDLPLNSSYHTWLRLFLPTGPPPSKKLPLIIYFHGGGFVFLSAANTMFHDFCSRVAVELPAVVISVDYRLAPESRLPAAYDDAIDAIYWVREQALVVGDDKAHDLKNVWLREYVDFSTCYLMGLSAGGNIAYHASLRCLPLDLEPVKIVGMVLIQPFFSGVQRSGSEMRLGNDGMFTLDMSDAMWEYALPKGADRDHEYCNPMVGDYGEKIGQLGRFLVCVRGGDMLRDRQMELVKMIEEKGGKVKCWFEEEGYHGVELSDCEKASELLVKIKHFIYEK

SEQ ID NO: 348 - protein, 337 aa, Tinospora cordifolia
MSDQVAPFTPVPITDPYDYVDLVHHHDGTITRKKPSNFPTVPTVPDLSYPAPVLSKDIPINQSNNTWARVYISRYKLESNSTNDLLPLIVYYPGGGFVISTTATPTCYNFCSKLALQLSAVVVSIDYRVGPEHLLPAAYDDAVEALNWIKFAEDSWLRDHANLSNCFIMGCSAGGNIAYHVGLRVAMEDVDSFKPLKINGLILHYPFFGGHERTESELRMANDLILPLIATDVMWKYSLPAGANRDHEYSNPAVVDRSKLFDKIKMLGWKILMSTGDKDPGIDRQIGLLTTMKEKGVKVKGRIVEGDHHGEELLNNSHKLDSLLVALKDFIFSTFSE

SEQ ID NO: 349 - protein, 330 aa, Thalictrum flavum
MAVPLNTWVLISNFKLAYTMLRRPDGTFNRHLAEFLDRKVPSNANPVDGVFSFDVIIDRATDLLCRVYRQALATEGRPSFLQLEQPLSSDVVVPVIIFFHGGSFAHSSANSAIYDTLCRRLVRNSKAVVVSVNYRRAPEYRYPCAYDDGQAALKWVHSRPWLRSGKDSKAHVYLAGDSSGGNIAHHVALRAVESGTEVLGNILLNPMFGGVERTESEKKLDGKYFVTLQDRDWYWRAFLPQGADRTHPACNPFGPNAASLEGVKFPKSLVVVAGLDLLHDWQLAYVQGLQRAGQDVKLMFLEQATIGFYLLPNNIHFFSLMDEINNFLSC

SEQ ID NO: 350 - protein, 326 aa, Xanthoriza simplicissima
MAEQNPSILPINPYEVLGIVHNPDDTLTRQIQIPCTTTSTDDISCAKITKDIPLNACNKTWLRLFRPIEQPVNVKLPIILYFRGGGFILCSASNTIFHNFCASMANKFPALIVSVDYRLAPESRLPSAYEDAIEAITWVKKQALDTNGEQWFKDLADFSKCYLMGCSSGGNIVYHVGLRAISLDLKPLLIKGLILNQPFFGGLRRTESEMRMVNDKTLPLVVSDLMWELALPAGSDRDHEYCNPRVDGGFKENIKLLSRCFVSVRGGDPLMDHQKEFVKMVEEEGVKVVNWFDEAGYHGMELFEPQKAEAMFVALKAFIYSSSDIE

SEQ ID NO: 351 - protein, 323 aa, Xanthoriza simplicissima
MASQADQAHVDRYKEHNIIYNPDDTLTRLITFPCTSTTDHNSLPNQPVFTQDIPLNPINKTWMRLFKPSNPQPPKTKLPLILYFHGSGFIIGSASNSTFHDFCTSMAIELSCVVLSLGYRLAPESRLPAAYEDAMEAIDWVRNKALDLGSDNCLKEVVDFSKCYLMGISSGGNMVYHAGLRVLSMDLHPMIIKGLILNHPFFGGLKRTNSELRLANDKFSLAFTDIMWELSLPKVFDRDHEYCNPMVEGSNKDKIGLLGRCFVSGCGGDILIDRQMEFAKMLEEKGASVVTWFEEEGCHGVELFEPEKTRALFFLLKEFISGQ

SEQ ID NO: 352 - protein, 326 aa, Xanthoriza simplicissima
MADQNTIIDPYKHINVVLNPDGTLTRPTLVPIIPPSSDPNSNSVISLDIPLNPSKSTWMRVFQPPNLSCNQKLPLIIYFHGGGFVLYSASSRPFHESCVKMASELPAIIISVDYSLAPENKLPSAYEDGMEALLWVNNQAINGEFEFCKFVDFSKCFIMGSSSGANITYQVGLRALKLDLEPVKIIGLIMNQPFFGGIQRTGSELRMVNDRIIPLVVADLMWELALPIGADKDHEYCNPMAAHFNEIKQLPRCFVNGYGGDPLVDRQKEFAKMLGEHGACLVEHYSDDGFHACELFIPDKAQALVMNIRDFIYSPGIGSNAATSTL

SEQ ID NO: 353 - DNA, 1008 bp, Argemone mexicana
atggaaggagagaaaggaatagtatgtgttacaggaggagcaggatacttggcatcatggctcatcaagaggctccttcaacatggctacactgttagaacaaccgttcgatctgatccacaattcaaagaagatatcagccacttgaaatccctcccagaagcatcaaagaatctccaagtttacgaagcagacctcgacaaaccaaaaagttttgacgatgttatcaacggttgcataggtgtctttcatgttgctcaccccattgattttgaagggaacaaaatgtctcaagataaagccattaaaatctctatagaaggaacactaggaattttaaaggcatgtttaaaatctaaaacagaaagtaggactgcagtaaagagagttgtttatacttcttctgtagctgcagctgtttttatcagcaacaaaaaagatgttgaagagattaatgagaatatttggacagaagttgaaaccctaaaaaagaatgaatttactagaaatgggtatctaatttcaaagacattaactgaaagatcagcattaaagtttgcagaagaacatgatttggatcttgttactttacttccttccatgattgttggacccttcctcacttctaatctccctttcagtttaacaatctctcaagctttggttctagataacaaagagaattgcaaaatattgaaaaacctgaataatgcagtacatatagatgatgtagcttcggcacaaatataccttttcgaatgcccagaagcaaaagggagacatatttgttcatcagttgatattactatccatgacattgcgaaacttatgtcaattaaatatccggaacttcaattaccaactgatttattaatggaaattgaagaagaaaagcctgtacatatctcttcaaagaaactcttgaacttggggttcaaattcaagtatggttttgaagacatgtatagtgatgcaatacaatgttgtaaagacaagggtttcctttaa

SEQ ID NO: 354 - DNA, 963 bp, Argemone mexicana
atggctgagtactgtgtgacaggagggaccggattcatagcttcttacatagtgaaagcattacttgagaaaggtcacaaggttagggcaacagtgagagacccagataatgtggaaaaggttggatatctttgggagatgcctggagctaaggaaagattaaagctagtaaaagctgatcttatggtcgatgggagcttcgatgatgctgtaaatggtgttgatggtgttttccatacagcatcccctgttcttgtgccttacgacaatgacgttcaggcgacgttgatcgatccaactataaagggcacgcggaatgttttgaaatcatgctctaaagcaagttccgttaagcgagttgtgtatacctcttcttgctctgcagtgagatatcgctacgatgttcaacaagtttcccctctaaatgaatcccattggagtgatcctcagtactgcaaaaaccacaatctatggtatgcgtacgcaaagacattagcagaggaagaagcttggaaaatagccaaggagagcgggattgatctagtggtggtgaacccgtctttcgtagtgggtcccttgattgcaccacaaccaaccagcacacttcttttgatactgggtatcgttaaaggactccgaggagaatatccaaatctcacggtgggatttgtacacatagatgacgtggttgctgcccatatcttagccatggaggagaccaaagcagcaggcaggcttatatgttcgagttccgttgctcacttctcagagatcatcggaatgctcaagtccaagtacccatcatatccatacgaaaacaagtgtggtgaccagaaaggagataataatccgcatagcatgagcagcaacaagattcagcagttgggtctccctcctttaaaaaatctaaatgaaatgtttgaagattgcatcaaaagctttcagaatcagggatttctgtga

SEQ ID NO: 355 - DNA, 987 bp, Berberis thunbergii
atggaaaatggaggagagaaagggagtgtttgtgtaactggtggagctggatacttggcttcatggctcatcatgagactccttgaaaatggttactctgttagagctactgcaagattagacccaaaattcaacgaggatgttactcacctcaaggcctttcctcatgcatcagaaaagctccaaatctttgatgcagatctcaacaaaccggatagtttcaacgatgtcattgaagggtgtgttggggtgttccatgttgctcaccctattgatcttgaagggaagagaccagaggcatcggtaaccaagactgcagttgatggagctctaggaattctcaaggcatgcttgcaagcaaaaactgtcaagaaggtagtttactcttctagtatggccgccgcggtgattagcaagttgaatgtccaggaaattgatgagagccagtggacagacgtcgacttctgtaggacccttgatgttcctggtatttcatatgttatctcaaagacagtgactgaaagagaatccatcaagttcgccaaagagcatggactacaacttgtgacaatgcttcctgcattgattgttggacctttcagctctcctagaattcctgaaagcgttgctatcgccctgtctttgtttaacggtgatccagagaaaccattaccagcatggaacactaatctggtgcacgtagatgatgtggttgcagctcaaattttccttttcgaatctccaaaggcagaggggagatacgtttgttgttcaactaatacaacagttccagagttggccaagtttattacaggcaaatatccagaactaaaagtccgacccgaattactcagcgatgtcggttcagaaaatattgtccgtctctcgtcgaacaagctcttaggcttgggatttgagttcaagcatggtctagagggaatatttgatggggcaatccaatgttgcaaagagaaaaatttactttga

SEQ ID NO: 356 - protein, 981 aa, Berberis thunbergii
ATGGATGTCAAAGGCAAAGTATGTGTGACTGGGGCATCAGGATACATGGCTTCTTGGCTTATTAAACGACTCCTCTTGTCTGGGTATCATGTCTGCGGAACAGTTAGAGAGCCAGGGAATTCTAAGAAAGTAGCTCATCTATGGCAATTGGAAGGAGCTAAGGAACGGCTCCAATTGCTCAAAGCTGATCTAATGGAGGATGGTAGCTTCGATGATGCTGTAATGGGATGTCATGGTGTCTTCCACACCGCCACCCCTGTCTTGACACCCAACATGGTCAAATCTGATCCTAAGGCTAAAATCTTGGCCCCTGCTATTAAGGGTACCTTAAATGTGTTGAGGTCGTGCAAAAAGAATCCGTATCTTAAGCGAGTGGTCTTGACATCATCATCAACAGCCATTAGGGTGAGAGATGAGGTTGACCCCAACATACCCCTGGATGAAATGTCTTGGAGCTCTGTGGAACGCTGCCAAAGGCTCCAGATTTGGTATGCATTATCAAAAGTTCTAGCTGAGAAGGCAGCATGGGAATTTGCAGAAGAGGAGGGGATAGACTTAGTTACTGTTTTACCCTCATTCATAATCGGGCCAAGTTTGCCACTTGATTTGTCCCTCACTGCTTCTGACATCCTTGGTCTTCTTAATGGTGTATCTGAGAGGTTCACGCAGCTTGGAAGAATGGGTTATGTTCACATTGACGATGTAGCACTTTGCCACATCCTTGTGTATGAAGAATCCAGTGCACAAGGAAGATATCTCTGCAGTTCGGTTGTGCTGGATAACAATGACTTGGCGTCCTTTCTAGCTCTCCGCTATCCAAGCTTACCCATACCAAAGAGGTTTGAGCAACTTGATAGACCATCTTTTGATTTCAATACATCCAAGCTGAAGAGCCTGGGCTTCAACTTCAAAGGGATTGAAGAAATGTTTGACGATTGTGTAGCATCACTCAAAGAGCAAGGCCATATTTCTCAGACATGA

SEQ ID NO: 357 - DNA, 963 bp, Berberis thunbergii
atgcctgagttttgtgtaactggaggaactggatttatagcagcttacttggtgaaagcattactagagaaaggctacaatgtcagggcgactgttcgcgacccagaggacgtagaaaaagttaagttcctatgggaaatgaatggagcaaaggaaagactaaagctggtaaaagctgatctcatggtggatgggagctttgatgatgccatacaaggtgtagacggtgtcttccatgctgcatcccccgttcttgtgccccaggatgatcacatccaggaaactttgatcgatccaattataaagggaacaataaatgttctgagctcctgctccaaatcacgcactgttaagcgggttgtactcacttcgtcctgttcttcaataagataccattatgatgtccaaaatgtctcccctcttaatgaaacgcattggagcgatcctgaatactgcaaacattacaatctgtggtatgcatacgcaaagacattgggtgagaaagaggcttggcgactggcagaagagaagggaatcaatctagtagtgatcaatccatcgtttgtggtgggccccttaattgcaccacaaccaaccagcacactcctcatgatactaaggatcataaaaggaaaactaggggagtacccaaacacagcattgggtttcgtacacattgatgatgtggtttccgcccacatgttagcaatggaagaaagtgaagcatcaggcaggtttatatgttcaagcaaagtagctcactggtccgacatcattaagatgctaaaggccaagtatccctcctacccaattgaaaccaagtgtgcgaagaagaaaggagatgacaagctacatagcatggacactagcaagattgaacagttgggactccgtgctttcaaaacactccctcaaatgtttgatgactgcatcaagagcttccaagacaaggaattgctgtga

SEQ ID NO: 358 - DNA, 1002 bp, Chordyalis celanthifolia
atggaaggaggaggagagaaagagaaagggactgtgtgtgtaactggtggtgcagggttcctggcatcatggatcatcatgaggctccttcaacacggttacaccgtgaggaccaccttccggtctgacccagagttcaaagaagatgtcagtcaccttaatgcccttccaggagcatcagagaagctcgaaatctttgaagccgatctcggaaaaccggggagttttaccgaagcaattaatggatgtataggggtttttcatgttgctcatcctaatgattttacagggaaaactacccaagaccaaatggtcaaattatcagttgaaggaactcttggaattctaaaagcatgtttagattcaaagacggtgaaacgagttgtctacacatcctcaatagctgcagcagggttgatgaatgatgccaaagatgtcaaggaaatgaccgaacaaatatggacagaagttgatgcttttagaacccttaatattccagggatttcatatgccgtttcaaagactctaactgaaagagcagctatagaatttgcagaggaaaatgggttggatcttgttaccttacttccatcgatggtcgtaggaccttttatgggttccaatctcccaacgagtgtatccctgggtctatcattagtttttggggatgaagagcttttgaaagctataaaaccatcatgttcttcagtgcacgttgacgatgtagcttccgcagaaatatttctttttgaatgcccggaagcgaaaggaagatacatatgttctgcagctgaaaatacaattcatgacttggtcaaatttcttactgtcaaatatccagaacttcaattgcatactcacttattgaaggagattggagaagcaaaacctggacatgtatcatcgaagaagctaatgagtatgggattcaagttcaagtatgggtttgaggagacgtatgatgaagccataaaatgctgcaaagcaaagggtctcatttag

SEQ ID NO: 359 - DNA, 996 bp, Chordyalis celanthifolia
atgggagtacaaagagaaagagggattgtgtgtgtaactggtggtgcaggtttcttggcatcatggatcatcaagaggctccttgaacgtggttactccgtgaggacaaccatccaatctaatcctgatttcaaggaagacgtcagccacattacttcccttccaggggcatcaaagaagctccaaatatacgaagccgatctcggaaaacctgatagcttttcagaagccattaatggatgcatcggggtctttcatgttgcccatcctactgatttcacaggaaaaactagccaagaagaaatgatcagaatatctgtagaaggaactctaggaattttaaggtcatgtttagattccaaaacagtgaagagagttatctacacatcttccacagttgcagctgggttagggacgagtattgaagatactaaggtaataaatgaacaaatgtggacgaacgttgatgcttttaaaagtacccttaatgctcctggaatttcatacgcggtttcaaagactataacggaaagagcagctatagattttgcacatgaacgtggattggatcttgttacgttacttccttcgatggtcatcggaccttttcttggttcctatcttccgatgagtgtatctttcgctctatctttaatattcggtaatgaagaactcttgaagcatatgaaaccaacatcggtagtagatatagacgatgtagcttccgcgcaaatatttctatttgaatcctcggaagcgaaagggagatacatttgttctgcgggtgaaaaaacaattcatgaggtagctagatttcttcagaagaaatatccagagcttcaaatgcaaactgaaatattgaaggagattgaagaagaagaacctgttcacacatcatcaaagaagctaacgagcttgggattcaatttcaagtatgggtttgaggagatgtatgataacacaataaaatgttgtaaacaaaagggattactttga

SEQ ID NO: 360 - DNA, 999 bp, Chordyalis celanthifolia
atgggagtccaattagagggagggattgtgtgtgtgactggtggtgcagggtttttggcatcatggattatcaagaggctccttgaacaaggttattccgtgaggacaaccatccaatctgaccctgaatttaaggaagatgttagtcacattacttcccttccaggagcattagagaaactcaaaatctttgaagctgatcttggaaagccagatagtttttccgaggccattgatggatgtatcggagtctttcatgttgctcatcctattgatttatcaggaaaaactagccaagaacaaatgatcaaactatctgtcgaaggaactctaggaattcttaagtcatgtttagattccaaaacagtgaaaagagttatatacacatcttccacacttgcggctggattagggacaagtttcgaagatactaaggaaatcaatgaacaaatgtggtcaaacattgatgctttaataaatagcactgataatgctccaggaacttcatatgcgatttcaaagacactaactgaaagagccgctatagattttgcggaggaacatggcttggatcttgttacgatacttccttctatgattgttggaccctttatttgtcccaatctaccgaacagtatagcttacgctctatcttttgttttcggtaacgaagaactcttgaaatatttgacaccaacatcggtagtacatgtagatgatgtagcttctgcacagatatttctactcgaatgttcggaagcgaaagggagatacatttgttctgtgggtgaaaagacaattcatgaggtgactaaatttgttcaaaccaaatatccagagcttaaagtgcaaactcaagtattgaaggagattgaagatgaacaacctgttcacacatcatcaaagaagctaataagcatgggattcaagttcaagtatgggctcgaggaattgtacgatgaaaccattcaatgttgcaaagaaaagggttttctttag

SEQ ID NO: 361 - DNA, 1035 bp, Chordyalis celanthifolia
atgggtgccactgttattgatcaagagaacacagatgatcaagagatggtgatgagaaagggtcctgtggttgtcactggtgctgccggttatataggttcatggcttgtcatgaggcttctccaacatggctacactgttcgtgcaaccgttcgagatcccactaatgttggaaagacgaagcatttagtggagctacctggtgcaaaagaacgactcacgatatggaaagcggacatggacgacgaaggaagctttgatgatgtggtccggggatgcacctgttttttccatctagccacaccaatggacttcgaatcaaatgatcctgagaatgaagtgatcaaacctgcaatcaatggagttttgaatgtgatgagatcatgtaagaaatccacaactctgaaacgtgttgtgttcacaacttctgctggaactgtcaacgttgaagaggttcaaaagccatcatacgatgaaaccaattggagtgacattgatttctgtaggagaacccaaatgactggttggatgtatttcgtatcgaaaacattggctgagaaagcagcatgggattttgctaaagagaacaacatggatttgattacgatcataccaccattagtcgttggtcctttcattatgaatagcatgccacccagcatgatcaccgcgctcgccctgatcaccggaaatgaagctcattattcaatactgaaacagattcagttaattcatttagatgatctgtgcaatgctcatatattcttgtatgagcatcctaaagctgaagggagatatatttgctcttctgcagaccccacaatttatgaacttgccaaaatgttgaaggagaaataccctgagtacaacatccctacaaagtttgagggaatcgatgagtcgatcaagcgtgtccatttctcttcaaagaagcttacagacttgggatttcaattcaagtataccatggaggatatgtttgatggagccattcagacatgcagggagaagaatttactcccacttcaaagctga

SEQ ID NO: 362 - DNA, 1035 bp, Chordyalis celanthifolia; identical to SEQ ID NO: 361

SEQ ID NO: 363 - DNA, 1017 bp, Chordyalis celanthifolia
atgtcaattacccggaaaaaaacggtatgtgttaccggaggtactggctacattgctggggttctcattaagaagttgttagagaagggatatgctgtcaatactactgtcaggaacccagacgatgagaaaaagatttctcctctcttgaagctacaaggtaagtataatgaccttaagattttcaaagcagacctaactattgaagggagtttcgatgaggccattgcctgctgccattttgtcttccatgttgctactcctatacacgtccattcggaagaccccgagaatgacatgatcaagccagcagtccaagggacactcaatgtcttaaactccgtcacgaaagcagagacggtaaagagggtggttttgacatcatcggcgacaacattatcgataaacaaactgaatggggtgggttatgtgatagatgagaaaagctggacggatgttgagttcctgacttctgagaaacctcctaattggggatatgcggccatgaaaacacttgtagagaaggcagcatggaaatttgcagaggaaaacaagatagacctaatcaccatcatccttccactagtgacaggccaatcgttgactcctgaacatgaacctcccagcatgccctttgcaatggcactgctcacagggaacaatgacctgatcaatgtcatgaaagatctgcaaatgctattaggatctgtcgcaatgatacacttggaggacgctgttgaatgtcacatatttctagctgagaatgaatcggcttatggacgttacaattgttgtcccatcaacactggccttgtcgagctaggaaagttttttgaaaatcgatacccgcaatacaatgtccatactgattttggagattttcctgcacaggccaagctgagtatttcatcagagaagcttatcaatgcagggttcaaattccagcatatagggctcgaggaaatttacgatgaatcagtggagtattacattgctttaggattattgcaaaaatga

SEQ ID NO: 364 - DNA, 990 bp, Chelidonium majus
atggaaggagagaaagggacggtttgcgtaacgggtggagctggattccttgcatcatggctcatcatgaggcttcttcaatatggatactctgttcgtaccactattcgatctgatccaaaattcaaggaagatatcagccatctcaaagcccgtccaaaggcacaagagaagctgcaaatctttgaagctgatcttgaaaaaccagaaagctttgacgaggcaattgatgggtgcgtcggggtctttcatgttgcacaccctattgattttgaagggaagatatcccaagacaaaatgatcaaaacttcagtagagggaactataggcattctaaagtcatgcttgaaatataaaacagtgaaaagggttgtctatacatcttctatgggtgcagccatgtttgttagcaacattttagatgtaaaggaggttgatgagaatatgtggacagaagttgataacttcaaaaacattccgcttcctggcgtgccctatgcaatgtcaaagaccataactgaaagagcagctatagaattcgcagaagaacatggcttggatcttgttactttacttcctggtatgattgtcgggcctttcctcggtcccaatctccctatcagtttgtccctcgctctttccatggtgtttggtaatgatgaatacacaaaaataatgagacagacaaatgtagtatacatagacgacatagcttgcgcgcaaatatttcttttggaatgcccaaacgcgaaagggaggcacatttgctctgcacttgatatcacaatccatgatgttgctaaatttatttccttcaaatttccggaacttcaattgcccattagtttattgaaggagattcaagaagaaaagcccattcatgtctcctcagagaagctcttgagtttgggatttaagttcaagtatggttttgaagatatgtatgatggagcaatcaaatgttgcaaagaaaagggttttcttagatga

SEQ ID NO: 365 - DNA, 987 bp, Chelidonium majus
atggaaggtggaagtgatgaaaagaaaggaacagtgtgtgtgacgggtggagctggatacataggctcatggctgatcatgcggctacttgagcgtggctattctgttcgagccaccgttagattggatcctggcctcaacagagatatcagccatcttacaaaccttccaggggcatcagataagctacaaattttcaatgcagatctcaaaaatcctcaaagtttcgatactgcaatagaaggatgtattggcgtctttctcgtagcatacccaggcaacatggatcaaattgaaattgacgatgttgcgaacgaaatgttagaggaagtaaccttagaactactaagagcatgtttgaaatctaagacagtgaaaagagtagtttacacttctagtgcagctgcagttttggtgaatgacaagggtcttatggaaatggatgagagttcatggagtgatgttgaattctgtagaaatgttaaacttcgtggcagttcatatattataacaaagacattaatagagcaagcggctctaaaatttgcagaagaaaatggattggaccttgtgtcgataatacctccgatggtcgttggtcctttcatttgtccacaccttcctgactcggtttctatggctttgtctatcatcttgggtaatcgacatccatatttcgcagtaatgcaaatggtgcatattgatgatatagtctcaggacatatatttctatttgaatgcccgaatgcgaaagggcgatacatctgctcctctatggagacatctgttcatgacatagccaaattttttacaacccattacccagagtttgagctaccaatgaatttgataagtgagatgaaagaagaaaagccaattcacctctctccaaagaagctcttaagtttgggattcaaattcaagtatgatttcaaggatatgtttgatggagcaattcaaagttgcaaagaaaagggtttcttgtag

SEQ ID NO: 366 - DNA, 963 bp, Chelidonium majus
atggcggaatactgtgtaacaggagggactggattcatagcttcttacctagtgaaagctttacttgaaaagggtcacagagttagggcaacagttcgagacccagagaatgtggaaaaggtaggattcctttgggagtttactggagcaaaggaaagactaaagctggtaaaagctgatcttatgatggagggaagctttgacgatgctgtaaatggcgtggatggtgtctttcatacagcatctcctgttaacgtgccttacgacaatgatgttcaggcaactttgatcgatccaagtataaagggaacgatgaatgttctgaaatcttgtgctaaagcaagctctattaagcgagttgtgcttacctcttcctgttctgctgtgagataccgctatgatgttcaacaagtctccccccttaacgaatcgcattggagcgaccctgaatactgcaaaagctacaatctatggtacccatactcaaagacattagccgaagaacatgcatggaaatgggccaaggagagcgggattgatctagtagtggtgaacccatctttcgtcgtgggtcccctgattgcaccatatccaaccagcacactccttatgatattgggaataataaaaggaatgcaaggcgaatatccaaatttcagattgggttttgtacacatagatgacgtagttgctgcccacatcttagccatggaggagagtaaagcatcaggcaggcttatatgttcaagttccgttgctcacttctcagagatcattgaaatgctcaagtccaagtacccatcctacccatttgaaaacaagtgctgtgatcggaaaggagacgacaatccacacagtatggataccagcaagattcgtcagttgggcctccctgcttttaaaactattcctgaaatgttcgaagactgcgtcaaaagcttccaggaaaagggatttctgtga

SEQ ID NO: 367 - DNA, 987 bp, Eschscolzia Californica
atggaaggagaaaaaaaggtggtttgtgtaacaggaggagcaggatacctagcatcatgcctcatcatgaaacttattcaacgtggttactatgttagggccaccatccgatctgacccaaaattcaacgaagatgtaagtcatctaaaagctatcccaggagcacaagagaaactagaaatcttcgacgcagatcttgaagacccagaaagtttcgacaatatcatggagggttgtgtcggagtctttcatgtggctcaaccaattgcatttggtgggagtaaagagattttagaaaaaatcattaaaacgtctctagaaggaactctaggaattctaaaggcatgcttaaaatctaaaacagtgaagaaagttgtatatacttcttcaaaagctgcagccttggatttcaaaaatgaagcaaaggagattgacgaaaatacatggacagacgtcgagacattaagaaagaatgaagttggtgatggttggtacccaatttcgaagacattgagtgaaaatgcagcactagattttgcagaagaacatggtttggatcttgttacgatacttccttcgatgattgttggtggcttccttagttcaactctccctctcgctttgaggctttctctcgctttagtcttgggtactgaagttgaatgtcggctacttgcacaagctggaaacgtggtacacatagaagatgtagtttcagctcatatatttttatttgagcgtccggaagcgaaagggagatacatatgttcatcaaacgatatcaccattcatgacgtcgctaagtttatctcagttaaatatccagaactgaaactaccaaccgaattacttgaggagtttgggaaggaaaaggcaatccattattcctcaaagaagctattggatttggggttcaagttcaagtatgggtttgaagatatgtatactgatgcaattgagtgttgcaaagagaagggttttctctag

SEQ ID NO: 368 - DNA, 996 bp, Glaucium flavum
atggaaggaggaggaggagagaaaggtacggtgtgtgttactggtggagctggattccttgcgtcgtggctcatcaagaggcttcttcagcatggatactctgttcggaccactgttcgatctgatcccaaattcaaggaagatatcacccacctccaagtccttccaggggcacaagagaagcttcaaatctttgaagccgatcttgaaaaaccagatagttttgacaacgccatcgacggatgcgtcggggtatttcatgttgcacacccgattgattttgaagggaagatatcccaagacacaatgatcaaaacctctgtcgagggaactctaggcattctaaagtcatgcttgaaggctaaaacagtgaagagagttgtttacacatcatctatgggtgcagccatgtttattaggaacatcaaagatgttaaggagattgatgagagtatgtggacagaagttgatatctttaaacactttgaaggttatggcatgtcctacgcagtttcgaagaccctaactgaaagagcagctatagaattcgcagaagaacatggcttggatcttgttactatacttcctggtatggttgttgggcctttcgatggtcctaatctcccagtcagtttgtccatggctcttgccttaattcttggtaatgaggagctagctaaactaatgagacaggcaaatgtagtacacatagacgacatagcttctgggcaaatcttccttatggaatgcccagaagcaaaagggagacacatttgttctgcaactgatatcacaatccatggcgttgcaaaacttatttccatcaaattcccagaaattcaattgcctattgatttattaaaggagatcgaggaggaaaagcctattcacgtctcctctgacaagctcttgagtttgggattcaagttcaagcatggttttgaagacatgtatgaaggagcaataagatgttgcaaagaaaagggttttctttag

SEQ ID NO: 369 - DNA, 1065 bp, Glaucium flavum
atgcatatatataagaatgaacccagcagatacacatcttctcaatatgagaagggagagagaaggatggaaggagagaaagggatagtatgtgtaacaggtggagcagggcacctagcatcttggttgatcatgaggctgcttcaacatggatactttgttcggaccaccgttcgatctgaccccaaattcaaagaagatatcagccacctcaaatctcttccagaggcagcagagaagctcgaagtattcgaggctgatctcgagaaaccggaaagtttttccgaagccatcaatggttgtatcggcgtatttcatgtagctcatccaatggaatacgaacaaaaagtgtcccaagagacaattatcaaaatctctgtagaaggaactttgggaattctaaagtcatgcttgaaatctaaaacagtaaaaagagttgtctatacttcttctatagctgcagctataagcatgagtaatgatatcaaggagattaatgagaatgtgtggacagaagtagacattgttaaaaatcttgaaggtccaactgtttcatatgcagtgtcaaagacattaacagaaagagcagctcttgagtttgctgaagaacatggattggatgttgtaaccatactgccttctattattgttggaccttccattagtaacaatcttccagtcagtactgctttggctctttcttctattctagatcaagaagagtacaagacattaaagaaagctcctaagccaccagctgcggtgcacatagatgacatcgtgtcagcagaaatctttcttttcgaatcgcctaaagcgaaaggaagatatatttgttccacagtggatattacagcccgcgatgttgctaaatttatagctacaaaatatccagaacttctattatcaacagatttatcaaaggaattcaaagaagaagaagaagaaaagcctgtccacatctcctcagacaagctgttgagtataggattcaagttcaagtatggttttgaagacatgtatgatgatgcaatacagtattgcaaagagaagggtttcctttag

SEQ ID NO: 370 - DNA, 987 bp, Glaucium flavum
atggaaggcggaagagatgacgagaaaggaattgtgtgtgtgacgggtggaacgggatacatagggtcatggctcatcatgcggctccttgagcgtggttacactgttcgagccaccgttagattggatcctggacacaatagagacatcagccaccttacatcccttcccggtgcattagaaaagcttcaaatcttcaacgcagatctccaaaatcctcaaagtttcaatgctgcaattgatggatgtgtcggcgtttttcttgttgcatatcctatcaacttggatcaaatcgaagttgacgatgctgcaaacggtaaaattgtgttggggactcttgaactactgaaggcatgtttgaaatcaaagacagttaagagagtggtttacacttctagcgcagctacacttatggtaaacgacaagggtcttatggaattggatgagagttcatggagtgatgttgagttctgcagaactgttaaggcttatgggagttcatatatcataccaaagactttaatagaacaagcagctctcaaattttctgaagagaatggattggatcttgtgtcgataattccgccaatggttgttggccctttcatctgctctcacctccctggctcaatttctatggctatggctctcattttagggaaccgatatccacgtgtgccaataacacaaatggtgcacattgacgatatagtttcaggacatatatttctatttgaatgccctgaagcaaaagggcgatacatatgctcttccctggagacatcaattcatgacgttgccaaattctttaccatccattacccagaatttgaaatgccaatgaatttgctaagtgagatgaaagaacaaaagccatttcacctttctccaaagaagctcttaagtttgggattcaaattcaagtatggtctcaaagacatgtttgatggagcaattcaaagttgcagagaaaagggttacttgtga

SEQ ID NO: 371 - DNA, 1137 bp, Glaucium flavum
atgggttctttgagtacaactagtgaagatcagaagatgatgagcaagggtccagttgtagtgaccggagccgccggttattgcggttcgtggctagtaatgaggcttcttcaacaaggttatactgtccgtgcaacagttcgagatcccactaaaatcgaaaagacgaggcatttgttggatctaccaggggcggaggaacgattaaccatatggaaggcagacctcgaggacgaaggaagctttgatgaagtgatagacggatccatctatgtcttccatctagccactccaatggattttgaatcaatagatcctgagaacgaagtgattaagcccacaatccatggagttttaaatgtgatgaagtcctgcaagaaagcgaagaccgtcaagcgtgttgtctttacaacttctgctggaaccgtaaacgttgaagagcaccaaaagccagtttacgacgaaacctcatggagtgacattgagttctgtaggcgggttaagatgactggttggatgtattttgtatcaaaatcattggccgagcaagctgcgtgggactttgcaaagaagaacaacattgatctcattagtgtcataccaacactagttgttggtcccttcattatgaatagcatgcccccaagcatgctcacagcgctcgccctcgtcacaggaaatacggcacattattcaattctaaagcagatccaattggttcacctagacgacctgtgcaatgcccatattttcctagcggaacatccaaatgctaagggaagatacatatgctcttctgaagacccaaccatctttcaactagccaacatgctcaaggacagatatccagaatttgacatccctaccaagtttgaaggtatcgacgagtcaatcaaaccagtccatttctcttcaaagaaacttaaagatctgggcttccaattccagtacaccatggaggacatgtatgacggagcgattcagtcgtgcagggagaagaaattgttcccacctggattagaaaaggataggcagaatgaaaagaaggaagttacaagcaaagttgtcaaggaggagaatgagaagatcacatcagttcatgcagtatctcatgcaaaaccagccattatggcataa

SEQ ID NO: 372 - DNA, 993 bp, Hydrastis canadensis
atggaagaagagaaaggaatagtgtgtgttacgggtggagcaggatgtgtagcttcatggctcatcatgaggctccttcaacatggatactccgttcgagccaccgttcgatctgatccaatgttcaaggaagatacaagccacctccttaacctccctgaggcaccagaaaagctacaaatctttgatgcagatcttgaaaatccagaaagctttgaagcagctatcaatggatgtattggtgtctttcatctctctcatcctatggattttgaaggaaagatacctctagacactctaatcaaaacatctatagagggaactctaggcattttaaaagcatgcttgaaatccaaaacagtgaagagagtagtttacacttcatctatttctgcagcaatgtgcatcagtaacatgaatgaaacggggcaaattgatgagagtatgtggagtgatcttgacatggttagaagccataattttcctgcagtttcttatatagtttcaaagacattgactgaaagtgcagttttagagttttcgaaagaacatggattggatgtagtaacaattcttccttcagcaattgctggtccatttctcacttcttaccttccagttgctttctcccagtctctgcctttgatttttggcaaagaagtgcaactcataaacatgacaaatacaaatctagtgcacatagatgatgtagcctcggcacaaatattcctttttgaatgcccaatagcagaagggagacacatttgttctacaattgatctttcaattcatgggttggcaaaactactttctaacaaatatccagaacttgaacttcaaattccaaccgatgatttaagcaagatggaagaaacaaaacctcttcacctctcatcaaagaagctcttaaatttgggattcaagttcaaatatgatctggaggagatgtttgatggaactattcagtgttgcaaagagaagggttttctttag

SEQ ID NO: 373 - DNA, 1062 bp, Hydrastis canadensis
atggtagcagagggtgactctgtttgtgtcaccggagcagcgggtttcattgggtcatggctggtcatgcggcttctcgaacgaggttacatggttaaggccaccgtgcgtgatcctgacaacataaagaaggtgaagcatctgctagacttaccaaatgctaaaacaagcttgaccctatggaaagctgatcttgtagacgagggaagcttcgacgacgcgataaaagggtgcaccggagtatttcatgtggctactccaatggattttgagtccaaggaccctgagaatgaagttataaagccaacaatagaagggatgttaaatgtgatgaggtcttgtgttaaggctaaaacagttagaagacttgttttcacttcatctgcaggaactgttaacgttcatcaacatccacaacagccaaagtatgatgaaaattgctggactgatgtagaattttgcaggaataagaagatgactggatggatgtatttcgtctccaaaactttggctgaaaaggcagcttgggaatttgccaaagacaacaatttagatttcatcagcattataccgacactcgtcgttgggccctttctcatgtcatcaatgcctcctagtcttataactgctctttcaccaattactggaaatgaagctcattactcaattttaaaacaaattcagttggtccatctagatgatctttccaatgctcatatttatttgtttgagcatccagaagcaaatggcagatatatatgctcttcttatgattccaccatcattgatgttgccaatgtgcttagacagaaattcccagagtataatgtccctaacaagtttaaggatgttgatgaaaatttgaaggcagtggcattctcatcgaaaaggctcatagacttgggattcaagtataagtacagcaaggaggacatgtttgtagaggccattgtttcatgtagagaaaaggggttacttcccctttgcagtgaaacacaagttaatgacaagagcatggaatgtgagaaacgagaagcgagaagcgaaggcggttcagattga

SEQ ID NO: 374 - DNA, 954 bp, Hydrastis canadensis
atggaaagagtgtgtgtaactggagctggaggatttcaggcgtcttggctcgtaaacttgctcctatctaaaggttacatggtccatggaacagtcagaaacccagacgacgaaaagaatgctcatttgaaggaactagaaaaagcctcagaaaacttaaagctcttcaaagctgacttgttggattacgacagtctatttgctgccattaatggatgcagtggtgtcttccatgttgcaagtccagttccttcaggcgctgtacccaatcccgaggtagaattgattgagcctgccgtaacaggtacatctaatgtactaaaggcgtgttccatggcaaagataaagaaagttgtgtatgtatcatctattgctgctgttatgctcaatccaaattggccaaaggataaactcatggatgaatcatgctggtcagacaaggaattctgcaagacaactgagaactggtattgcctatccaaaacagaagcagaaagtcaagccttagattatgcaaagaaaagtggactcgaggtcgtaacagtttgtgcatccatcatcattggaccaatgttgcaatctaaaatgaatgctagtagtttgcttcttctcaggatgttgaaagatgggttggagacactagataacaaaattcggatgtttgtcgatgtgcgtcatgtggctgaagcactattgttggtttacaagaagcctgaagctgaagggagatatatatgttccgcattcacacttacaatgaaggacttgaacgaaaaattgaagactatgtatcctaactataattatcctaaacaaattgttggggttgatgaagcttgggatatcagttcagaaaaattactgaatctgggatggaagtatagaccattggaagatacccttattgactcaataaaaaattatcaagaaaaagggctcttacataaggtatag

SEQ ID NO: 375 - DNA, 981 bp, Jeffersonia diphylla
atggaagggaagacaggaactatgtgtgtgacaggaggagctgggtacctgggttcatggttggttatgaagcttcttaagcgtggttattctgttagagcaacagtcagattagatcctgagcacaagaaggacctcagccatctcaaaaacctcccaggagcgtcagaacaccttaaattttttaatgcggacctcaacaaaccagatagcttcgatgctgccatcgaaggatgtgatggtgtctttcatgtagctcatcccttagatttccaaggaaacgaagcagatcctgctaggatcagtatggcagtagaaggaactcttgggatacttaaggcatgtgtaaactctaagacagtgaagagagtcgtgtacacttctagcgtggctgctgttgttttaaatacaactgggctgatggaaatggatgagaactcatggacagaccttgaacttgttgaaactattaaagctcctggaagctcatatattgtaccgaagacattagcagaacaagctgctataaaatttgcacaagaacatggattggatctgatcacggtggctccttctttgattgttggtccgttcatttgtcctcattttcccacttctgtgttcctggccttagccgtacttatgggtaagaccgataagtttcaatacattagcataaccagtatggtgcacatagaagatatagtggcagcgcatatattccttctcgaatgcccgaatgctaagggacgttttatatgttcagcgcttgatacgacaatccatgacttggctaagtttctgtctagcaagtacgaagattttgaaatgccaatagattcactgaaggagatagaagaaaggaagccacttcatctctcttcaaagaaactgctagacttaggattcacatacaagtatggccttgatgaaatatacgatggagcgattcaatgttgcaaagagaaggggttaatgtag

SEQ ID NO: 376 - DNA, 1002 bp, Jeffersonia diphylla
atgccaaagaaggcggcggtcgatcagaagatggacttcaaaggcaaagtatgtgtgacaggggcctcagggtatctggcttcttggttggttaaacgactcctcctgtctgggtatcatgtgaaaggaacagttagagacccaggaaatagcaaaaaattggcgcatctttggcaactggatggagcaaaggagagacttgaattggtgaaagctgatctgatggaggatggcagctttgatgatgccataatgggctgttgtggtgtcttccacactgcatctcctgtcttgggccctgagtctgatccaaaggctgaaatcctggatcctgctgttaatggaaccctaaacattctgaggtcgtgcaaacggaatccaggtcttaagcgtgtcatactcacgtcttcctctgcagctgttagggtcagagatgattttgacccaaacattccattggatgaaacgtcttggagctcagtggaaatctgtgaaagattccagatttggtatgcattatcgaaaattctagcggagaaggcagcatgggaatttgctaaagaaaatgggattgacttagtcactatcctgccatcattcttaattgggccaagtctgccacatgatttgtgttccactgcatcggatgtccttggtttacttacaggtggtccgaataagttctcctttcacggtaggatgggctacattcacattgatgatgtggcactctgtcacatccttcttttcgaggaagccaaagctcatggaagatacctctgcagttcctttgtgatggataacaatgatctggcatcttttctagctcagcgctatccatacttaccaataactaagaggtttgagccacttgatagaccatgctatgaattcaatacatccaagatgaagagcttgggcttcaaatttaaagggattgaagaaatgttcgacgattgtgtagcatcactcaaggagcaaggctatatactccagaaataa

SEQ ID NO: 377 - DNA, 984 bp, Jeffersonia diphylla
atgagtatcggagcagggaaggtggtatgcgtaactggggcatctgggtacatcgcttcatggctagtgaagcttcttctggaacggggttacactgtcaaagcctctgttcgtgatcccaatgattacaacaagactgtacatttgcgtgcactctctagagccaatgaaaggcttcaattatttaaagcaaatttactggaagaaggatcctttcattctgtaattgatgggtgtgaaggtgtttttcatacagcatctccattttttcataacgtcacagatccacaggctgaattaattgatcctgcagtgaacggaactcttaatgttcttggttcgtgtgcaaaaattccaacagtcaaaagagtggttgtaacatcatcagcagctgcagttgtttataatggaaaaccacggacccctgaagtggtagttgatgagacttggttctcggatgcagaattatgcaagaatctcaagctttggtacgtagtttcaaagaccttagctgaagagtctgcttggaaatttgcagaaaaaaatgggattgatatggttgcaataaatccagcaatggtgattggtccactattacagccgacacttaatacaagtgctgaagctattctgaacataataaaaggaggggaaacttttcccaatcgcactcttggatgggtccatgttaaagatgttgccaacgcacatattctggcctttgagaattcctcggctactggacgatattgtttattcgagagtgttgctcactattctgagctagttaggattctacgtgagctttatcctggtctgaagctccctgagaaaagtgaagatgacaagccatttgcaccgacatatcaagtatccagggagaaagctaaagggctgggcattgatttcattcctttggagattggcctcaaggaaactgttgaaagcttgaaagagaagaagtttgtcagttttgaagtttag

SEQ ID NO: 378 - DNA, 978 bp, Menispermum canadense
atgagcagtggagcaaagaaggtggtgtgcgtgacgggagggtctggctacatagcttcctggcttgtgaagcttctgcttgagcgaggatacactgtcaaggcttctgtgcgggatccaaatgatccaaagaagattggacatttacttgctcttcctggggctaatgaaaggcttaaattgttgaaagcagatttattggaagaaggatcttttgattctgtgattgatgggtgtgaaggtgtctttcatacagcatctccatttttccacgcagtcacagatccacagactgaactaattgcccctgctgtgaaagggactctcaatgttcttagttcttgcgcaaaaactccatctgttaaaagagtagtcgtgacgtcctccatggcagctgttctctactatgggaaacctcgaactccagaggtggttgttgatgagacttggtattctgatccagagttttgcaaggaatcaaagctctggtatgtagtgtcaaagactttagctgaagaagctgcatggaaatttgcaaaagaaaatggacttgatatagtcacaataaatccagcaatggtgattggttcgctgctacaaccaactttaaatacaagtgcggcagctgttctgaatttaataaacggatcagaaacatttccaaattatacttttgcatgggttcatgtgaaagatgtcgccactgcccatattctggcatttgagactccttcagcgagtggaagatattgcttagttgagagggttgctcattattcagatgtcgtgaaggttttgcatgacctctatcctaacctgtcacttcctcagaagtgtgcagatgacaaaccatttgtaccgacttaccaagtctcgattgagaaagccaaaggcttgggcattgatttcattccaatggaggtgagcctcaaggagacggtcgaaggcttgaaggagaaaaacatgatcagtttctga

SEQ ID NO: 379 - DNA, 966 bp, Menispermum canadense
atggagggagcgaacgaaagagtgtgtgtgacaggtgctggtgggtttgtggcatcctggctggtgaagcttctcctctctaagggctacaccgtacatggaactgttagagacccaagagataaaaaaaatgctcacttgatgaagcttaaggaaggctatgagaagctgcagctcttccaggcagacttgatgaattacagttctctttgtgcagccatcacaggttgcaatggagttttccatgttgcaactccagttccaccaggctctgacgcagttcttgaggctgaattggttgagccagctattgtgggtacactaaatgtacttaaagcatgctctgaagcaaaagttaagagagttgtggttgtgtcatcttcggctgctgttgaaatgaatcctaattggccaaaagatcaagttatggatgagacatgttggtccgacaaggaatattgcaaacaaaccaagaactggtattttttctccaaaacagtagcagagaacgaagccttagagtattcaaagggaactgggttggatgttgtgacagtttgtcccagcattgttattgggcctatgctgcaatccactgtaaatggtagtagcttggttctcatcaagattttgaaagatggaattgatagagtagaaaacaaagtgcgtatgcttgtggacgtacgtgaagttgctgaagcactgcttctgacatataagaagcccgaagcccaaggcagatacctatgtgtgtcatacatgatcagaatgaaggatttggtggaaaagctaaggagcgtgtatcctaattataattatccaaagaattttaccgaggttgaggaggaagacaagctgagttctgcaaaactgcagagtctgggatggaaatttaggccactggaggagacacttgctgattctgttaagagctaccaagaggctggtattctagacaaggattag

SEQ ID NO: 380 - DNA, 990 bp, Nandina domestica
atggaaggaggtgataagggtacagtgtgtgttacaggtggagctggattccttgcttcatggctcattacgaggctccttcgacatggttactctgttcgagctactgttcgatctgatccaaaattcaaggaggataccacccacctcatgaacctccccgaggcacaagaaaaacttgcaatcttcgatgcagatctcgagaagcctggaacttttgaacctgtcgttgagggatgtattggtgtttttcatgttgctcatcccatggacatggaagggaaaacaccccaagaaacaataaccaaaatctctgtagagggaactctaggacttctgaatgcatgcttgaaatctaaaacggtgaaaagagttgtatacacttcatctacagctgcagctatgtgtgttagtaatttgaaggaacttcaggaaatagatgagaacatgtggtcagatgttgagatgctcaagggtttgagccttcctggactttcttactctatttcaaagacactcacagaaagagcagcaattgagtttggggcaaagaatggattggatgttgttacattgcttcctgctgcaattgtgggaccattccacactcctaatatccccattggtgttgctctggctttggctttggtatttggtaacgaattagcgtgtcaactcgcaaaacaattaaacattgtccacatagacgatgtagcctctgcgcaaatcttccttttggaatgcccaaaagcagtaggcagacatatttgttcatcagctgatactacaattcatggattagccaaatttttctctgccagataccctgaattccaaatgccaattgatttgttaagcaaaatggaagaagaaaagcctattcacctttcctcaaagaagctcttggatttggggttcaaattcaacaatggtatagagaagatgtatgatggagcaattgagagttgcaaacagaaaggttttctttag

SEQ ID NO: 381 - DNA, 999 bp, Nandina domestica
atggaaatggaaggagagaaagggagtggtagtagagttgtatgtgtaacaggtggaggaggatatatagcatcatggctcatcatgagactccttcaacttggttactctgttcgagccactgccagattggacccaaaattgaagaaagacctcagccacctcacaaacctcccaagagcatcacaaaacctcaagatcttcaacgcggacctaaaccaaccagacagcttcactgctgccatcgaaggttgtgatggacttttccacgtagcgcacccccttgatttggaagactgtgaagttgacgatgcaaaggtgaatatgttagttgaaggaactctaggggttctcaaggcgtgtgtgaagtctaaaacagtgaagcgagttgtctacacttctagtgtggctactgttgttgctaacaaaactgggctcatggagatggatgaaagcatatggagtgacattgattttgttaaagcttataagtttcctggaagctcatatgttgcggctaagacattatcggaacaagcagcgattaagtttgctgaagaacatggtttggaacttgtgacagtgatttcttcgatggtcgccggtccattcatttgtccttcattgcccagctcagtgtgcatggctttggcattgatcatgggtaagagtgatcaatatatcaatcttgttaaggcaaatttggtgcacatagatgatatcgttgctgcacacatattcctcctggaatgcccaaaagcgaaaggacgttacatatgctcagcaattgatacaacaatccatgaattagctaaatatctctcattcaagtatccagaatttgaaatgccgatggattcgctcaaaggggtaccagaaatgcagccaattcatgtctcttctaagaagttgatggatttgggattcaagtttaaatatggtttggatgaaatatttgatggagcaattcaaagttgcaaagaaaaagggtttatgtag

SEQ ID NO: 382 - DNA, 921 bp, Nigella sativa
atggctgatgaggaacaacctagtaccaaattgagggcttgtgttattggaggaactggatacctggcgagtttcctcatcaagcacttgctgcagaaaggttatcatgtgaactctactgccaaagatccaggtaatccagaaacgatctcccaccttttggagttgcaaaatttgggtgagctgaaaatattcagagcagatttaactgatgaaggcagctttgatgaggcagtatctggatgcctcgtagtgtttcatgttgcaactccagtgcactttgattctgaagatcccgagaatgacatgatcaaaccagcaattcaagggacactaaatgttctcaaggcatgcacaaaggcacagacagtaaagcgtgtggttatgacatcttcggcagcagctgtgtccataaacaatattaataacacagatccggtgatggatgaagaatggtggaccgatgttcaatacttgtcttcagagaagccatttgcttggggatatccagtctcaaaggccctagcagagaaggcagcatggaaatatgcagaaaacaatgaaatggaccttatcactgtcatcccttctgtaatcgcaggtccatctcttactccaaatgttccaaacagcgtaagccttgccatgtcattgcttacaggaaatgaaagcctgatcaacggtttaaaaggaatgcaaattacatcgggttcgatttcactgttacacatagaggatgtggtaagagcacatatatttgtagctgagaagcaatcagctacaggtcgatacatttgttctgctgtcagtaccagtgttcctgagcttgcaaaatttctgagtaaacgatatccacaatatgtagttctttcagaacgagcctgtagctgcgaagtagtatcgggaggaggagttttatga

SEQ ID NO: 383 - DNA, 960 bp, Nigella sativa
atgcctgagtattgtgtaactggaggtactggattcatagccgcttacatagtgaaagaactgctccacaaaggttataatgtcagggcgacagtccgggacccaggggatgcagagaaggtcgggttccttctagaaatggatggagcaaaggaaagactcaagctggtaaaagctgatctcctggaagatggaagctttgatgatgcggtgcaaggagtagatggagtcttccatacagcatctccagttcttgttccctatgacgagaatatacaggaaactttgatcgatccatgcatcaagggaacagtaaatgttctcaagtcctgctccaaagcaagctcagtgaagcgggtggtactcacttcttcatgctcgtctataagatattgtgacgaagcgcaaaaagcgccccttaatgagtcccattggagtgatcctgagtactgcaaaagctataatctctggtatgcatatgcaaaaacattgggtgagaaagaggcttggcgactgtcaaaggagcttggaattgatctagtggtggtgaacccatcttatgttgttggtcctctgattgcaccacaaccaactagcacactcctcatgatactggggatcataacaggtgtaactgatgaatatccaaatacaatgattggttttgtacacattgatgatgtggtccgtgcacacattttggctatggaagaaagcagagcagcaggcaggcttatatgttcaagctcagttgtccactggtcagagatcattaagatgttaaaagacaagtatccatcctacccaatgccaacaaagtgctctgacaagaaaggagatgataccccacattccatggacaccagcaagatcaatgaattggggctcccagctttcaaaacagtccctcaaatgtttgatgattgcatcaagagctttcaagagaagggatttccgtga

SEQ ID NO: 384 - DNA, 1026 bp, Sanguinaria canadensis
atggaaatggaaggagagaaagggagtggtagtagagttgtatgtgtaacaggtggaggaggatatatagcatcatggctcatcatgagactccttcaacttggttactctgttcgagccactgccagattggacccaaaattgaagaaagacctcagccacctcacaaacctcccaagagcatcacaaaacctcaagatcttcaacgcggacctaaaccaaccagacagcttcactgctgccatcgaaggttgtgatggacttttccacgtagcgcacccccttgatttggaagactgtgaagttgacgatgcaaaggtgaatatgttagttgaaggaactctaggggttctcaaggcgtgtgtgaagtctaaaacagtgaagcgagttgtctacacttctagtgtggctactgttgttgctaacaaaactgggctcatggagatggatgaaagcatatggagtgacattgattttgttaaagcttataagtttcctggaagctcatatgttgcggctaagacattatcggaacaagcagcgattaagtttgctgaagaacatggtttggaacttgtgacagtgatttcttcgatggtcgccggtccattcatttgtccttcattgcccagctcagtgtgcatggctttggcattgatcatgggtaagagtgatcaatatatcaatcttgttaaggcaaatttggtgcacatagatgatatcgttgctgcacacatattcctcctggaatgcccaaaagcgaaagggcgttacatatgctcagcaattgaaacaacaatccatgaattagctaaatatctttcaatcaagtatccagaatttgaaatgccgatggattcgctcaaaggggcaccagaaatgcagccaattcatgtctcttctaagaagttgatggatttgggattcaagtttttaatggtttggatgaaatatttgatggagcaattcaaagttgcaaagaaaaagggtttatgtagatgtcttctagtactcgaattgccatag

SEQ ID NO: 385 - DNA, 1140 bp, Sanguinaria canadensis
atgggttctaccactcatgatcaagatgatcagatgatggtgatgatcaagggtcctgttgtagtgaccggagccgccggttattgcggttcgtggcttgtgatgaggcttcttcaacaaggttatactgttcgtgccacggttcgcgatcccactaaaatcgaaaaaacgaagcatttattggatataccaggggcaaaagaacgattaaccatatggaaagcagaccttgaagacgaaggaagctttgacgaagtgatagaaggatccatctatgttttccatctagccaccccaatggactttgaatcaacggatcctgagaatgaagtgatcaagcccacaatcgatggagttctaaatgtgatgaaatcgtgcaagaaagccaagactgtaaagcgtgttatattcaccacttctgcaggaacaatcaacgttgaaaaacaacaaaagccaatttacgatgaaacctcatggagcgaccttgagttctgcaggcagaccaagatgactggttggatgtattttgtgtcgaaaacattggccgagcaagctgcatgggactttgctaaggagaataacattcatttcattagcgtcataccgactctagttgtcggtcccttcatcacgaataacatgccgcctagcatgctcaccgcgctcgccttgatcacaagaaatgaagcacattattcaattctaaagcaaattcaatttgttcacctagatgacttgtgcaatgcccatattttcctagccgaacacccaaaagctgagggaagatacatatgctcttctgaagaccccaccatcttccaactagccaacatgctcagtgccagatatcctgaatttgacatccctaccaagtttgaaggtattgatgagtcaatcaagcccgtccatttttcgtcgaagaaacttaaagatctagggttccaatttaagtacaccatggaagacatgttcgatggagccattcaatcttgcagggagaagaaattgttcccatctgacttagaaaagaataatcaacactttgattatcagaaggaaattatagacctagcagcagccaaggagaagattcagatctcgtcagtgccagctccagaaaaaccaaccattatggcatag

SEQ ID NO: 386 - DNA, 1020 bp, Sanguinaria canadensis
atggattggaaggtgatcggaaagaagacggtatgtgttaccggtggcaccggttatgtcgcctcgttactcattaagaacttgctagagaagggtacttatgctgtcaatactactgctaggaatccagaggatcagaaaaaggttgctcatctcttaattctacaagcagatcatagtgacttaaaaattttccgagcagatttaaccgatgaggggagctttgacaccgccatcgctggctgcgatatcgtctttcatgttgcgactcctgtgaactttaattcacaagaccctgagaatgaaatgatcaatccagccatccacgggacgctcaatgtgttgaacgcgtgcgtgaaatctaagacagtgaagcgcgtggttttgacgtcgtcggcagctgccgtgtctataaataatcagaacggaacaggttttgtgatggacgaaggatgctggacggacgtcgagttcttagcttccgcaaaaccacctatttggggatatccagtgtcaaaaacacaagcagagaaggcagcctggaaatttgcagaagaaaacaagatagacctcatcacagtcatcccttctctaatgctgggcccatcacttactcttgctgtcccctccagtatctttcttggaatgtcattgctcacagggaacaatgaactgatcaacaccttgaaaggcatgcaaatgctatcgggctcgatctcgataacacacgtagaggatgttgttaatgctcacatatttctagctgagaaggaatcggcttctggccgctacatttgctgcaacatcagcagtagccttcctgagctggcgaagttactcagcaatcgatacccacagtacaaagtccctactgatttcagagattttcctacaaaggccaagctgagtctttcatcagaaaagcttattaacgaagggttcagcttcaaatacggaatcgaggaaatttacgatcaaaccatggagtactacaaatctgtagaacttctgcagaaatga

SEQ ID NO: 387 - DNA, 966 bp, Sanguinaria canadensis
atggcggaggagtactgtgtgacgggagggactggattcatagcggcttacatagttaaagcattactggagaaaggccacagggttagggcaacagtgcgagacccagacaaggtggaaaaggttggattcctttgggagtttactggggcaaaggaaagattaaagctggtaaaagctgatcttatggtggaggggagcttcgacgaggccatagatggcgtggacggtgtcttccatacagcatctcctgttctcgtgccttacgacactgacattcaggcgactttgatcgatccaagtataaagggaacgatgaatgttctgagatcctgctctaaatcaagttcccttaagcgagttgtgcttacctcttcttgttctgctgtgagataccgctatgatgttcaacaagtctcccctctaaatgaatcacattggagcgatcctgaatactgcaaaagctacaacctatggtacccgtacgcaaagacattagccgaggaacaggcttggaaattggccaatgagagtgggattgatctagtagtagtgaacccatcttacgtcgtgggtcccctgattgcaccatatccaaccagcacactccttatgatactgggaatcataaaaggagtgcaaagcgaatatccaaatttggcagtgggttttgtacacatagacgatgtggtagctgcccacatcctagccatggaggagagtaaagcatcaggcaggcttatatgttcaagttcagtcgctcacttctcagagatcattgaaatgcttaagtccaaatatccatcctacccaattgtaaacaagtgcaatgacaagaaaggagatgacattccacatagcatggacaccagcaagattcgtcagttggggttccctgcttttaaaactattcctgaaatgttcgaagactgcatcaaaagcttccaggaaaagggatttctgtga

SEQ ID NO: 388 - DNA, 1125 bp, Stylophorum diphyllum
atgggttctataaatatagatccgacgatgatgaagaaagggcctgttgtagtgactggggctaccggttattgcggttcgtggcttgtgatgaggcttcttcaagaaggttatattgttcgtgccacagttcgcgatcccagtaaaatcgaaaagacgaagcatttactgggtctacctggggcaaaggaacgattgaccttatggaaagcagaccttgaagacaaaggaagctttgatgaagtgatagagggatccatctatatgttccatcttgccactccaatggactttgagtcaacagatcctgagaatgaagtgattaagcctacaatcaatggagttctaaatgtgatgaagtcgtgcaagaaatctaagaccgtcaagcgtgttatcttcacaacttctgcgggaaccgtcaatgttgaagagcaccttaagccagtttatgatgaaacctcatggagtgatgttgagttctgcaggcggatcaaaatgactggttggatgtattttgtgtcaaaaacgttggccgagcaagctgcgtgggactttgctaaggagaacaacattcatctcattagtgtcataccaacactagttgtaggtcccttcatcatgaatagcatgccacctagcatgatcaccgcgctcgccctaatcacaggaaataaagcacattattcaattctaaagcagattcaattagttcatctagacgacttgtgtaatgcccatatttttgtcgccacacatccaaaagccgagggaagatacatttgctcttctgaagaccccaccatcttccaactagccaacatgatcagagacagacatccagaattcgacatccctacaaagtttgaaggtatcgacgaggcgattaagccaatacatttctcttcgaagaaacttaaagacctagggttccaattcaagtacactatggaagacatgtacgatggagccattcagtcgtgcagggagaagaaattgttcccacctgagttggaaaagaataagaagcagtatgatcatcagaaggaagtactagtcaaggagaagaagatctcaacagcagtgcccaatgcagttctacaagagatagaaaagaatattaattag

SEQ ID NO: 389 - DNA, 963 bp, Stylophorum diphyllum
atggcggaatactgtgtaacaggagggactggattcatagcttcttacctagtgaaagctttacttgaaaagggtcacagggttagggcaacagttcgagacccagagaatgtggaaaaggtaggattcctttgggaatttactggagcaaaggaaagattaaagctggtaaaagctgatcttatgatggagggaagcttcgacgatgctgtaaatggcgtggatggtgtcttccatacagcatctcctgttaacgtgccttacgacaatgatgttcaggcaactttgatcgatccaagtataaagggaacgatgaatgttctgaaatcttgtgctaaagcaagctctattaagcgagttgtgcttacctcttcttgttctgctgtgagataccgctatgatgttcaacaagtctccccccttaacgaatcgcattggagcgaccctgaatactgcaaaagctacaatctatggtacccatactcaaagacattagccgaagaacatgcatggaaatgggccaaggagagcgggattgatctagtagtggtgaacccgtctttcgtcgtgggtcccctgattgcaccatatccaaccagcacactccttatgatattgggaataataaaaggaatgcgaggcgaatatccaaatttcagattgggttttgtacacatagatgacgtggttgctgcccacatcttagccatggaggagagtaaggcatcaggcaggcttatatgttcaagttccgttgctcacttctcagagatcattgaaatgctcaagtctaagtacccatcctacccatttgaaaacaagtgctgtgatcggaaaggagacgacaatccacacagtatggataccagcaagattcgtcagttgggcctccctgcttttaaaactattcctgaaatgttcgaagactgcatcaaaagcttccaggaaaagggatttctgtga

SEQ ID NO: 390 - DNA, 966 bp, Stylophorum diphyllum
atggctaaaggcacggtctgtgtaactggtgcatcgggtttcctggcttcttggctcatcaagcgacttctgttatctggctatcatgtcgttggcactgttagagaccctggaaatgacacaaaactggctcacctatggaacttacaaggagcaaaggagaggctccggctagttaaagccgaattaacagaagagggaagctttgacgatgcaatcaaggggtgtgagggtgtctttcacatggcttcccccgttcttggacagcctactgatcctcaggacatcttaaagccagctattgatggaactcttaatgtgttacgttcgtgtaaaaagaatccgtcactaagacgagtggttctcacatcatcgtcttccacaatcagagtaagagaaaagttagaccccaaaaatcctttggacgagtcatcttggagctcagttgaactctgttctaaactcaagatttggtatgtactatcaaaaacaatggcagaaaaggcagcatgggagttctgtaacgaaaatgggatcaatctagtgacggttagcccttcatttgttgtaggaccaagcttaccacctgctttatgctctacagcatcagatatcttgggcttgcttcaaggtgaaactgagaggttttattggcatggaaggatgggatatgtccatatagatgatgttgctctatgtcatattctagtttatgaacgtgaagaagctgaaggacggtatctatgcagctcgactgtcgttgataatgatgaactcgtgtcaattctgtcagcacgctatcctacactacctataccaaagaggtttgagcagcatgaaagaccctattatgacttcaacacgaacaagattaagagtttagggttcacattcaaatcgattccagagatgtttgacgactgtatcacatctctagtggcacaaggccatctgtcgataccttag

SEQ ID NO: 391 - protein, 335 aa, Argemone mexicana
MEGEKGIVCVTGGAGYLASWLIKRLLQHGYTVRTTVRSDPQFKEDISHLKSLPEASKNLQVYEADLDKPKSFDDVINGCIGVFHVAHPIDFEGNKMSQDKAIKISIEGTLGILKACLKSKTESRTAVKRVVYTSSVAAAVFISNKKDVEEINENIWTEVETLKKNEFTRNGYLISKTLTERSALKFAEEHDLDLVTLLPSMIVGPFLTSNLPFSLTISQALVLDNKENCKILKNLNNAVHIDDVASAQIYLFECPEAKGRHICSSVDITIHDIAKLMSIKYPELQLPTDLLMEIEEEKPVHISSKKLLNLGFKFKYGFEDMYSDAIQCCKDKGFL

SEQ ID NO: 392 - protein, 320 aa, Argemone mexicana
MAEYCVTGGTGFIASYIVKALLEKGHKVRATVRDPDNVEKVGYLWEMPGAKERLKLVKADLMVDGSFDDAVNGVDGVFHTASPVLVPYDNDVQATLIDPTIKGTRNVLKSCSKASSVKRVVYTSSCSAVRYRYDVQQVSPLNESHWSDPQYCKNHNLWYAYAKTLAEEEAWKIAKESGIDLVVVNPSFVVGPLIAPQPTSTLLLILGIVKGLRGEYPNLTVGFVHIDDVVAAHILAMEETKAAGRLICSSSVAHFSEIIGMLKSKYPSYPYENKCGDQKGDNNPHSMSSNKIQQLGLPPLKNLNEMFEDCIKSFQNQGFL

SEQ ID NO: 393 - protein, 328 aa, Berberis thunbergii
MENGGEKGSVCVTGGAGYLASWLIMRLLENGYSVRATARLDPKFNEDVTHLKAFPHASEKLQIFDADLNKPDSFNDVIEGCVGVFHVAHPIDLEGKRPEASVTKTAVDGALGILKACLQAKTVKKVVYSSSMAAAVISKLNVQEIDESQWTDVDFCRTLDVPGISYVISKTVTERESIKFAKEHGLQLVTMLPALIVGPFSSPRIPESVAIALSLFNGDPEKPLPAWNTNLVHVDDVVAAQIFLFESPKAEGRYVCCSTNTTVPELAKFITGKYPELKVRPELLSDVGSENIVRLSSNKLLGLGFEFKHGLEGIFDGAIQCCKEKNLL

SEQ ID NO: 394 - protein, 326 aa, Berberis thunbergii
MDVKGKVCVTGASGYMASWLIKRLLLSGYHVCGTVREPGNSKKVAHLWQLEGAKERLQLLKADLMEDGSFDDAVMGCHGVFHTATPVLTPNMVKSDPKAKILAPAIKGTLNVLRSCKKNPYLKRVVLTSSSTAIRVRDEVDPNIPLDEMSWSSVERCQRLQIWYALSKVLAEKAAWEFAEEEGIDLVTVLPSFIIGPSLPLDLSLTASDILGLLNGVSERFTQLGRMGYVHIDDVALCHILVYEESSAQGRYLCSSVVLDNNDLASFLALRYPSLPIPKRFEQLDRPSFDFNTSKLKSLGFNFKGIEEMFDDCVASLKEQGHISQT

SEQ ID NO: 395 - protein, 320 aa, Berberis thunbergii
MPEFCVTGGTGFIAAYLVKALLEKGYNVRATVRDPEDVEKVKFLWEMNGAKERLKLVKADLMVDGSFDDAIQGVDGVFHAASPVLVPQDDHIQETLIDPIIKGTINVLSSCSKSRTVKRVVLTSSCSSIRYHYDVQNVSPLNETHWSDPEYCKHYNLWYAYAKTLGEKEAWRLAEEKGINLVVINPSFVVGPLIAPQPTSTLLMILRIIKGKLGEYPNTALGFVHIDDVVSAHMLAMEESEASGRFICSSKVAHWSDIIKMLKAKYPSYPIETKCAKKKGDDKLHSMDTSKIEQLGLRAFKTLPQMFDDCIKSFQDKELL

SEQ ID NO: 396 - protein, 333 aa, Chordyalis celanthifolia
MEGGGEKEKGTVCVTGGAGFLASWIIMRLLQHGYTVRTTFRSDPEFKEDVSHLNALPGASEKLEIFEADLGKPGSFTEAINGCIGVFHVAHPNDFTGKTTQDQMVKLSVEGTLGILKACLDSKTVKRVVYTSSIAAAGLMNDAKDVKEMTEQIWTEVDAFRTLNIPGISYAVSKTLTERAAIEFAEENGLDLVTLLPSMVVGPFMGSNLPTSVSLGLSLVFGDEELLKAIKPSCSSVHVDDVASAEIFLFECPEAKGRYICSAAENTIHDLVKFLTVKYPELQLHTHLLKEIGEAKPGHVSSKKLMSMGFKFKYGFEETYDEAIKCCKAKGLI

SEQ ID NO: 397 - protein, 331 aa, Chordyalis celanthifolia
MGVQRERGIVCVTGGAGFLASWIIKRLLERGYSVRTTIQSNPDFKEDVSHITSLPGASKKLQIYEADLGKPDSFSEAINGCIGVFHVAHPTDFTGKTSQEEMIRISVEGTLGILRSCLDSKTVKRVIYTSSTVAAGLGTSIEDTKVINEQMWTNVDAFKSTLNAPGISYAVSKTITERAAIDFAHERGLDLVTLLPSMVIGPFLGSYLPMSVSFALSLIFGNEELLKHMKPTSVVDIDDVASAQIFLFESSEAKGRYICSAGEKTIHEVARFLQKKYPELQMQTEILKEIEEEEPVHTSSKKLTSLGFNFKYGFEEMYDNTIKCCKQKGLL

SEQ ID NO: 398 - protein, 332 aa, Chordyalis celanthifolia
MGVQLEGGIVCVTGGAGFLASWIIKRLLEQGYSVRTTIQSDPEFKEDVSHITSLPGALEKLKIFEADLGKPDSFSEAIDGCIGVFHVAHPIDLSGKTSQEQMIKLSVEGTLGILKSCLDSKTVKRVIYTSSTLAAGLGTSFEDTKEINEQMWSNIDALINSTDNAPGTSYAISKTLTERAAIDFAEEHGLDLVTILPSMIVGPFICPNLPNSIAYALSFVFGNEELLKYLTPTSVVHVDDVASAQIFLLECSEAKGRYICSVGEKTIHEVTKFVQTKYPELKVQTQVLKEIEDEQPVHTSSKKLISMGFKFKYGLEELYDETIQCCKEKGFL

SEQ ID NO: 399 - protein, 331 aa, Chordyalis celanthifolia
MGGQREREIICVTGGAGFLASWIIKRLLEHGYSVRTTVQSNPEFKEDVSHITSLPRASKKLKIYEADLEKPDSFFDAINGCTGVFHVAHPTDFTGKTSQEQMIKISVDGTLGILKSCLDSKTVKRVIYTSSTVAAGLGLSINDTEAINEQMWTDVDTFKNTLNAPGISYAVSKTITERAAIDFAREHGLDLITLLPSMVIGPFLGSNLPMSVSFALSLIFGNEELLKHMKPTSVVDIDDVASAQIFLFECSEAKGRYICSNGEKTIHEVARFLQKKYPKLKIQTEILKEIEEEEPVHTSSKKLLSLGFKFKYEFEEMYDETIKCCEENGFL

SEQ ID NO: 400 - protein, 344 aa, Chordyalis celanthifolia
MGATVIDQENTDDQEMVMRKGPVVVTGAAGYIGSWLVMRLLQHGYTVRATVRDPTNVGKTKHLVELPGAKERLTIWKADMDDEGSFDDVVRGCTCFFHLATPMDFESNDPENEVIKPAINGVLNVMRSCKKSTTLKRVVFTTSAGTVNVEEVQKPSYDETNWSDIDFCRRTQMTGWMYFVSKTLAEKAAWDFAKENNMDLITIIPPLVVGPFIMNSMPPSMITALALITGNEAHYSILKQIQLIHLDDLCNAHIFLYEHPKAEGRYICSSADPTIYELAKMLKEKYPEYNIPTKFEGIDESIKRVHFSSKKLTDLGFQFKYTMEDMFDGAIQTCREKNLLPLQS

SEQ ID NO: 401 - protein, 338 aa, Chordyalis celanthifolia
MSITRKKTVCVTGGTGYIAGVLIKKLLEKGYAVNTTVRNPDDEKKISPLLKLQGKYNDLKIFKADLTIEGSFDEAIACCHFVFHVATPIHVHSEDPENDMIKPAVQGTLNVLNSVTKAETVKRVVLTSSATTLSINKLNGVGYVIDEKSWTDVEFLTSEKPPNWGYAAMKTLVEKAAWKFAEENKIDLITIILPLVTGQSLTPEHEPPSMPFAMALLTGNNDLINVMKDLQMLLGSVAMIHLEDAVECHIFLAENESAYGRYNCCPINTGLVELGKFFENRYPQYNVHTDFGDFPAQAKLSISSEKLINAGFKFQHIGLEEIYDESVEYYIALGLLQK

SEQ ID NO: 402 - protein, 329 aa, Chelidonium majus
MEGEKGTVCVTGGAGFLASWLIMRLLQYGYSVRTTIRSDPKFKEDISHLKARPKAQEKLQIFEADLEKPESFDEAIDGCVGVFHVAHPIDFEGKISQDKMIKTSVEGTIGILKSCLKYKTVKRVVYTSSMGAAMFVSNILDVKEVDENMWTEVDNFKNIPLPGVPYAMSKTITERAAIEFAEEHGLDLVTLLPGMIVGPFLGPNLPISLSLALSMVFGNDEYTKIMRQTNVVYIDDIACAQIFLLECPNAKGRHICSALDITIHDVAKFISFKFPELQLPISLLKEIQEEKPIHVSSEKLLSLGFKFKYGFEDMYDGAIKCCKEKGFLR

SEQ ID NO: 403 - protein, 328 aa, Chelidonium majus
MEGGSDEKKGTVCVTGGAGYIGSWLIMRLLERGYSVRATVRLDPGLNRDISHLTNLPGASDKLQIFNADLKNPQSFDTAIEGCIGVFLVAYPGNMDQIEIDDVANEMLEEVTLELLRACLKSKTVKRVVYTSSAAAVLVNDKGLMEMDESSWSDVEFCRNVKLRGSSYIITKTLIEQAALKFAEENGLDLVSIIPPMVVGPFICPHLPDSVSMALSIILGNRHPYFAVMQMVHIDDIVSGHIFLFECPNAKGRYICSSMETSVHDIAKFFTTHYPEFELPMNLISEMKEEKPIHLSPKKLLSLGFKFKYDFKDMFDGAIQSCKEKGFL

SEQ ID NO: 404 - protein, 320 aa, Chelidonium majus
MAEYCVTGGTGFIASYLVKALLEKGHRVRATVRDPENVEKVGFLWEFTGAKERLKLVKADLMMEGSFDDAVNGVDGVFHTASPVNVPYDNDVQATLIDPSIKGTMNVLKSCAKASSIKRVVLTSSCSAVRYRYDVQQVSPLNESHWSDPEYCKSYNLWYPYSKTLAEEHAWKWAKESGIDLVVVNPSFVVGPLIAPYPTSTLLMILGIIKGMQGEYPNFRLGFVHIDDVVAAHILAMEESKASGRLICSSSVAHFSEIIEMLKSKYPSYPFENKCCDRKGDDNPHSMDTSKIRQLGLPAFKTIPEMFEDCVKSFQEKGFL

SEQ ID NO: 405 - protein, 328 aa, Eschscholzia californica
MEGEKKVVCVTGGAGYLASCLIMKLIQRGYYVRATIRSDPKFNEDVSHLKAIPGAQEKLEIFDADLEDPESFDNIMEGCVGVFHVAQPIAFGGSKEILEKIIKTSLEGTLGILKACLKSKTVKKVVYTSSKAAALDFKNEAKEIDENTWTDVETLRKNEVGDGWYPISKTLSENAALDFAEEHGLDLVTILPSMIVGGFLSSTLPLALRLSLALVLGTEVECRLLAQAGNVVHIEDVVSAHIFLFERPEAKGRYICSSNDITIHDVAKFISVKYPELKLPTELLEEFGKEKAIHYSSKKLLDLGFKFKYGFEDMYTDAIECCKEKGFL

SEQ ID NO: 406 - protein, 331 aa, Glaucium flavum
MEGGGGEKGTVCVTGGAGFLASWLIKRLLQHGYSVRTTVRSDPKFKEDITHLQVLPGAQEKLQIFEADLEKPDSFDNAIDGCVGVFHVAHPIDFEGKISQDTMIKTSVEGTLGILKSCLKAKTVKRVVYTSSMGAAMFIRNIKDVKEIDESMWTEVDIFKHFEGYGMSYAVSKTLTERAAIEFAEEHGLDLVTILPGMVVGPFDGPNLPVSLSMALALILGNEELAKLMRQANVVHIDDIASGQIFLMECPEAKGRHICSATDITIHGVAKLISIKFPEIQLPIDLLKEIEEEKPIHVSSDKLLSLGFKFKHGFEDMYEGAIRCCKEKGFL

SEQ ID NO: 407 - protein, 354 aa, Glaucium flavum
MHIYKNEPSRYTSSQYEKGERRMEGEKGIVCVTGGAGHLASWLIMRLLQHGYFVRTTVRSDPKFKEDISHLKSLPEAAEKLEVFEADLEKPESFSEAINGCIGVFHVAHPMEYEQKVSQETIIKISVEGTLGILKSCLKSKTVKRVVYTSSIAAAISMSNDIKEINENVWTEVDIVKNLEGPTVSYAVSKTLTERAALEFAEEHGLDVVTILPSIIVGPSISNNLPVSTALALSSILDQEEYKTLKKAPKPPAAVHIDDIVSAEIFLFESPKAKGRYICSTVDITARDVAKFIATKYPELLLSTDLSKEFKEEEEEKPVHISSDKLLSIGFKFKYGFEDMYDDAIQYCKEKGFL

SEQ ID NO: 408 - protein, 328 aa, Glaucium flavum
MEGGRDDEKGIVCVTGGTGYIGSWLIMRLLERGYTVRATVRLDPGHNRDISHLTSLPGALEKLQIFNADLQNPQSFNAAIDGCVGVFLVAYPINLDQIEVDDAANGKIVLGTLELLKACLKSKTVKRVVYTSSAATLMVNDKGLMELDESSWSDVEFCRTVKAYGSSYIIPKTLIEQAALKFSEENGLDLVSIIPPMVVGPFICSHLPGSISMAMALILGNRYPRVPITQMVHIDDIVSGHIFLFECPEAKGRYICSSLETSIHDVAKFFTIHYPEFEMPMNLLSEMKEQKPFHLSPKKLLSLGFKFKYGLKDMFDGAIQSCREKGYL

SEQ ID NO: 409 - protein, 378 aa, Glaucium flavum
MGSLSTTSEDQKMMSKGPVVVTGAAGYCGSWLVMRLLQQGYTVRATVRDPTKIEKTRHLLDLPGAEERLTIWKADLEDEGSFDEVIDGSIYVFHLATPMDFESIDPENEVIKPTIHGVLNVMKSCKKAKTVKRVVFTTSAGTVNVEEHQKPVYDETSWSDIEFCRRVKMTGWMYFVSKSLAEQAAWDFAKKNNIDLISVIPTLVVGPFIMNSMPPSMLTALALVTGNTAHYSILKQIQLVHLDDLCNAHIFLAEHPNAKGRYICSSEDPTIFQLANMLKDRYPEFDIPTKFEGIDESIKPVHFSSKKLKDLGFQFQYTMEDMYDGAIQSCREKKLFPPGLEKDRQNEKKEVTSKVVKEENEKITSVHAVSHAKPAIMA

SEQ ID NO: 410 - protein, 330 aa, Hydrastis canadensis
MEEEKGIVCVTGGAGCVASWLIMRLLQHGYSVRATVRSDPMFKEDTSHLLNLPEAPEKLQIFDADLENPESFEAAINGCIGVFHLSHPMDFEGKIPLDTLIKTSIEGTLGILKACLKSKTVKRVVYTSSISAAMCISNMNETGQIDESMWSDLDMVRSHNFPAVSYIVSKTLTESAVLEFSKEHGLDVVTILPSAIAGPFLTSYLPVAFSQSLPLIFGKEVQLINMTNTNLVHIDDVASAQIFLFECPIAEGRHICSTIDLSIHGLAKLLSNKYPELELQIPTDDLSKMEETKPLHLSSKKLLNLGFKFKYDLEEMFDGTIQCCKEKGFL

SEQ ID NO: 411 - protein, 353 aa, Hydrastis canadensis
MVAEGDSVCVTGAAGFIGSWLVMRLLERGYMVKATVRDPDNIKKVKHLLDLPNAKTSLTLWKADLVDEGSFDDAIKGCTGVFHVATPMDFESKDPENEVIKPTIEGMLNVMRSCVKAKTVRRLVFTSSAGTVNVHQHPQQPKYDENCWTDVEFCRNKKMTGWMYFVSKTLAEKAAWEFAKDNNLDFISIIPTLVVGPFLMSSMPPSLITALSPITGNEAHYSILKQIQLVHLDDLSNAHIYLFEHPEANGRYICSSYDSTIIDVANVLRQKFPEYNVPNKFKDVDENLKAVAFSSKRLIDLGFKYKYSKEDMFVEAIVSCREKGLLPLCSETQVNDKSMECEKREARSEGGSD

SEQ ID NO: 412 - protein, 317 aa, Hydrastis canadensis
MERVCVTGAGGFQASWLVNLLLSKGYMVHGTVRNPDDEKNAHLKELEKASENLKLFKADLLDYDSLFAAINGCSGVFHVASPVPSGAVPNPEVELIEPAVTGTSNVLKACSMAKIKKVVYVSSIAAVMLNPNWPKDKLMDESCWSDKEFCKTTENWYCLSKTEAESQALDYAKKSGLEVVTVCASIIIGPMLQSKMNASSLLLLRMLKDGLETLDNKIRMFVDVRHVAEALLLVYKKPEAEGRYICSAFTLTMKDLNEKLKTMYPNYNYPKQIVGVDEAWDISSEKLLNLGWKYRPLEDTLIDSIKNYQEKGLLHKV

SEQ ID NO: 413 - protein, 326 aa, Jeffersonia diphylla
MEGKTGTMCVTGGAGYLGSWLVMKLLKRGYSVRATVRLDPEHKKDLSHLKNLPGASEHLKFFNADLNKPDSFDAAIEGCDGVFHVAHPLDFQGNEADPARISMAVEGTLGILKACVNSKTVKRVVYTSSVAAVVLNTTGLMEMDENSWTDLELVETIKAPGSSYIVPKTLAEQAAIKFAQEHGLDLITVAPSLIVGPFICPHFPTSVFLALAVLMGKTDKFQYISITSMVHIEDIVAAHIFLLECPNAKGRFICSALDTTIHDLAKFLSSKYEDFEMPIDSLKEIEERKPLHLSSKKLLDLGFTYKYGLDEIYDGAIQCCKEKGLM

SEQ ID NO: 414 - protein, 333 aa, Jeffersonia diphylla
MPKKAAVDQKMDFKGKVCVTGASGYLASWLVKRLLLSGYHVKGTVRDPGNSKKLAHLWQLDGAKERLELVKADLMEDGSFDDAIMGCCGVFHTASPVLGPESDPKAEILDPAVNGTLNILRSCKRNPGLKRVILTSSSAAVRVRDDFDPNIPLDETSWSSVEICERFQIWYALSKILAEKAAWEFAKENGIDLVTILPSFLIGPSLPHDLCSTASDVLGLLTGGPNKFSFHGRMGYIHIDDVALCHILLFEEAKAHGRYLCSSFVMDNNDLASFLAQRYPYLPITKRFEPLDRPCYEFNTSKMKSLGFKFKGIEEMFDDCVASLKEQGYILQK

SEQ ID NO: 415 - protein, 327 aa, Jeffersonia diphylla
MSIGAGKVVCVTGASGYIASWLVKLLLERGYTVKASVRDPNDYNKTVHLRALSRANERLQLFKANLLEEGSFHSVIDGCEGVFHTASPFFHNVTDPQAELIDPAVNGTLNVLGSCAKIPTVKRVVVTSSAAAVVYNGKPRTPEVVVDETWFSDAELCKNLKLWYVVSKTLAEESAWKFAEKNGIDMVAINPAMVIGPLLQPTLNTSAEAILNIIKGGETFPNRTLGWVHVKDVANAHILAFENSSATGRYCLFESVAHYSELVRILRELYPGLKLPEKSEDDKPFAPTYQVSREKAKGLGIDFIPLEIGLKETVESLKEKKFVSFEV

SEQ ID NO: 416 - protein, 325 aa, Menispermum canadense
MSSGAKKVVCVTGGSGYIASWLVKLLLERGYTVKASVRDPNDPKKIGHLLALPGANERLKLLKADLLEEGSFDSVIDGCEGVFHTASPFFHAVTDPQTELIAPAVKGTLNVLSSCAKTPSVKRVVVTSSMAAVLYYGKPRTPEVVVDETWYSDPEFCKESKLWYVVSKTLAEEAAWKFAKENGLDIVTINPAMVIGSLLQPTLNTSAAAVLNLINGSETFPNYTFAWVHVKDVATAHILAFETPSASGRYCLVERVAHYSDVVKVLHDLYPNLSLPQKCADDKPFVPTYQVSIEKAKGLGIDFIPMEVSLKETVEGLKEKNMISF

SEQ ID NO: 417 - protein, 321 aa, Menispermum canadense
MEGANERVCVTGAGGFVASWLVKLLLSKGYTVHGTVRDPRDKKNAHLMKLKEGYEKLQLFQADLMNYSSLCAAITGCNGVFHVATPVPPGSDAVLEAELVEPAIVGTLNVLKACSEAKVKRVVVVSSSAAVEMNPNWPKDQVMDETCWSDKEYCKQTKNWYFFSKTVAENEALEYSKGTGLDVVTVCPSIVIGPMLQSTVNGSSLVLIKILKDGIDRVENKVRMLVDVREVAEALLLTYKKPEAQGRYLCVSYMIRMKDLVEKLRSVYPNYNYPKNFTEVEEEDKLSSAKLQSLGWKFRPLEETLADSVKSYQEAGILDKD

SEQ ID NO: 418 - protein, 329 aa, Nandina domestica
MEGGDKGTVCVTGGAGFLASWLITRLLRHGYSVRATVRSDPKFKEDTTHLMNLPEAQEKLAIFDADLEKPGTFEPVVEGCIGVFHVAHPMDMEGKTPQETITKISVEGTLGLLNACLKSKTVKRVVYTSSTAAAMCVSNLKELQEIDENMWSDVEMLKGLSLPGLSYSISKTLTERAAIEFGAKNGLDVVTLLPAAIVGPFHTPNIPIGVALALALVFGNELACQLAKQLNIVHIDDVASAQIFLLECPKAVGRHICSSADTTIHGLAKFFSARYPEFQMPIDLLSKMEEEKPIHLSSKKLLDLGFKFNNGIEKMYDGAIESCKQKGFL

SEQ ID NO: 419 - protein, 332 aa, Nandina domestica
MEMEGEKGSGSRVVCVTGGGGYIASWLIMRLLQLGYSVRATARLDPKLKKDLSHLTNLPRASQNLKIFNADLNQPDSFTAAIEGCDGLFHVAHPLDLEDCEVDDAKVNMLVEGTLGVLKACVKSKTVKRVVYTSSVATVVANKTGLMEMDESIWSDIDFVKAYKFPGSSYVAAKTLSEQAAIKFAEEHGLELVTVISSMVAGPFICPSLPSSVCMALALIMGKSDQYINLVKANLVHIDDIVAAHIFLLECPKAKGRYICSAIDTTIHELAKYLSFKYPEFEMPMDSLKGVPEMQPIHVSSKKLMDLGFKFKYGLDEIFDGAIQSCKEKGFM

SEQ ID NO: 420 - protein, 306 aa, Nigella sativa
MADEEQPSTKLRACVIGGTGYLASFLIKHLLQKGYHVNSTAKDPGNPETISHLLELQNLGELKIFRADLTDEGSFDEAVSGCLVVFHVATPVHFDSEDPENDMIKPAIQGTLNVLKACTKAQTVKRVVMTSSAAAVSINNINNTDPVMDEEWWTDVQYLSSEKPFAWGYPVSKALAEKAAWKYAENNEMDLITVIPSVIAGPSLTPNVPNSVSLAMSLLTGNESLINGLKGMQITSGSISLLHIEDVVRAHIFVAEKQSATGRYICSAVSTSVPELAKFLSKRYPQYVVLSERACSCEVVSGGGVL

SEQ ID NO: 421 - protein, 330 aa, Nigella sativa
MSSSTTTEGAGKTVCVTGGSGYIASWLIKLLLQRGYTVKATVRDPNDPRQTMHLRELCGAGERLSLFKADLLSEGVFDSIVNDCDGVFHTASPCYFEAKDPQAEIVEPAVKGTLNVLRSCTKSPSVKRVIVTSSIAAVLNNGKLRTPDVVVDETWFSDPEVCKELKLWYPLSKTLAEESAWKFAKDHGIDMVSINPAMVIGPLLQPTLNSSSSIILNLINGAKTYTNAAYGLVDVRDVANAHILAFEVPSATGRICLAEKVCHFSEMVEILHELYPDIQLPTKCATDEPFVQPYQLCTEKARSLGINFTPIGVSLKETVESLKAKKFVNL

SEQ ID NO: 422 - protein, 319 aa, Nigella sativa
MPEYCVTGGTGFIAAYIVKELLHKGYNVRATVRDPGDAEKVGFLLEMDGAKERLKLVKADLLEDGSFDDAVQGVDGVFHTASPVLVPYDENIQETLIDPCIKGTVNVLKSCSKASSVKRVVLTSSCSSIRYCDEAQKAPLNESHWSDPEYCKSYNLWYAYAKTLGEKEAWRLSKELGIDLVVVNPSYVVGPLIAPQPTSTLLMILGIITGVTDEYPNTMIGFVHIDDVVRAHILAMEESRAAGRLICSSSVVHWSEIIKMLKDKYPSYPMPTKCSDKKGDDTPHSMDTSKINELGLPAFKTVPQMFDDCIKSFQEKGFP

SEQ ID NO: 423 - protein, 341 aa, Sanguinaria canadensis
MEMEGEKGSGSRVVCVTGGGGYIASWLIMRLLQLGYSVRATARLDPKLKKDLSHLTNLPRASQNLKIFNADLNQPDSFTAAIEGCDGLFHVAHPLDLEDCEVDDAKVNMLVEGTLGVLKACVKSKTVKRVVYTSSVATVVANKTGLMEMDESIWSDIDFVKAYKFPGSSYVAAKTLSEQAAIKFAEEHGLELVTVISSMVAGPFICPSLPSSVCMALALIMGKSDQYINLVKANLVHIDDIVAAHIFLLECPKAKGRYICSAIETTIHELAKYLSIKYPEFEMPMDSLKGAPEMQPIHVSSKKLMDLGFKFLMVWMKYLMEQFKVAKKKGLCRCLLVLELP

SEQ ID NO: 424 - protein, 379 aa, Sanguinaria canadensis
MGSTTHDQDDQMMVMIKGPVVVTGAAGYCGSWLVMRLLQQGYTVRATVRDPTKIEKTKHLLDIPGAKERLTIWKADLEDEGSFDEVIEGSIYVFHLATPMDFESTDPENEVIKPTIDGVLNVMKSCKKAKTVKRVIFTTSAGTINVEKQQKPIYDETSWSDLEFCRQTKMTGWMYFVSKTLAEQAAWDFAKENNIHFISVIPTLVVGPFITNNMPPSMLTALALITRNEAHYSILKQIQFVHLDDLCNAHIFLAEHPKAEGRYICSSEDPTIFQLANMLSARYPEFDIPTKFEGIDESIKPVHFSSKKLKDLGFQFKYTMEDMFDGAIQSCREKKLFPSDLEKNNQHFDYQKEIIDLAAAKEKIQISSVPAPEKPTIMA

SEQ ID NO: 425 - protein, 339 aa, Sanguinaria canadensis
MDWKVIGKKTVCVTGGTGYVASLLIKNLLEKGTYAVNTTARNPEDQKKVAHLLILQADHSDLKIFRADLTDEGSFDTAIAGCDIVFHVATPVNFNSQDPENEMINPAIHGTLNVLNACVKSKTVKRVVLTSSAAAVSINNQNGTGFVMDEGCWTDVEFLASAKPPIWGYPVSKTQAEKAAWKFAEENKIDLITVIPSLMLGPSLTLAVPSSIFLGMSLLTGNNELINTLKGMQMLSGSISITHVEDVVNAHIFLAEKESASGRYICCNISSSLPELAKLLSNRYPQYKVPTDFRDFPTKAKLSLSSEKLINEGFSFKYGIEEIYDQTMEYYKSVELLQK

SEQ ID NO: 426 - protein, 321 aa, Sanguinaria canadensis
MAEEYCVTGGTGFIAAYIVKALLEKGHRVRATVRDPDKVEKVGFLWEFTGAKERLKLVKADLMVEGSFDEAIDGVDGVFHTASPVLVPYDTDIQATLIDPSIKGTMNVLRSCSKSSSLKRVVLTSSCSAVRYRYDVQQVSPLNESHWSDPEYCKSYNLWYPYAKTLAEEQAWKLANESGIDLVVVNPSYVVGPLIAPYPTSTLLMILGIIKGVQSEYPNLAVGFVHIDDVVAAHILAMEESKASGRLICSSSVAHFSEIIEMLKSKYPSYPIVNKCNDKKGDDIPHSMDTSKIRQLGFPAFKTIPEMFEDCIKSFQEKGFL

SEQ ID NO: 427 - protein, 374 aa, Stylophorum diphyllum
MGSINIDPTMMKKGPVVVTGATGYCGSWLVMRLLQEGYIVRATVRDPSKIEKTKHLLGLPGAKERLTLWKADLEDKGSFDEVIEGSIYMFHLATPMDFESTDPENEVIKPTINGVLNVMKSCKKSKTVKRVIFTTSAGTVNVEEHLKPVYDETSWSDVEFCRRIKMTGWMYFVSKTLAEQAAWDFAKENNIHLISVIPTLVVGPFIMNSMPPSMITALALITGNKAHYSILKQIQLVHLDDLCNAHIFVATHPKAEGRYICSSEDPTIFQLANMIRDRHPEFDIPTKFEGIDEAIKPIHFSSKKLKDLGFQFKYTMEDMYDGAIQSCREKKLFPPELEKNKKQYDHQKEVLVKEKKISTAVPNAVLQEIEKNIN

SEQ ID NO: 428 - protein, 320 aa, Stylophorum diphyllum
MAEYCVTGGTGFIASYLVKALLEKGHRVRATVRDPENVEKVGFLWEFTGAKERLKLVKADLMMEGSFDDAVNGVDGVFHTASPVNVPYDNDVQATLIDPSIKGTMNVLKSCAKASSIKRVVLTSSCSAVRYRYDVQQVSPLNESHWSDPEYCKSYNLWYPYSKTLAEEHAWKWAKESGIDLVVVNPSFVVGPLIAPYPTSTLLMILGIIKGMRGEYPNFRLGFVHIDDVVAAHILAMEESKASGRLICSSSVAHFSEIIEMLKSKYPSYPFENKCCDRKGDDNPHSMDTSKIRQLGLPAFKTIPEMFEDCIKSFQEKGFL

SEQ ID NO: 429 - protein, 321 aa, Stylophorum diphyllum
MAKGTVCVTGASGFLASWLIKRLLLSGYHVVGTVRDPGNDTKLAHLWNLQGAKERLRLVKAELTEEGSFDDAIKGCEGVFHMASPVLGQPTDPQDILKPAIDGTLNVLRSCKKNPSLRRVVLTSSSSTIRVREKLDPKNPLDESSWSSVELCSKLKIWYVLSKTMAEKAAWEFCNENGINLVTVSPSFVVGPSLPPALCSTASDILGLLQGETERFYWHGRMGYVHIDDVALCHILVYEREEAEGRYLCSSTVVDNDELVSILSARYPTLPIPKRFEQHERPYYDFNTNKIKSLGFTFKSIPEMFDDCITSLVAQGHLSIP

SEQ ID NO: 430 - DNA, 993 bp, Nigella sativa
atgagtagcagtactactactgaaggtgcagggaagacagtgtgcgtaacaggtggttctggatacatagcttcatggcttatcaagcttctgcttcaacgtggttacactgtcaaagctactgttcgtgacccaaatgatcctagacagaccatgcatttacgtgaactttgtggagctggtgagcgacttagtttgttcaaggcagacttattgagtgaaggtgtttttgactccatagtcaatgattgcgacggtgttttccatacagcatctccctgctattttgaagccaaagatccacaggctgaaatagttgagccagcggtgaagggaacacttaatgttctcagatcttgcactaaatcaccctcagttaaaagggtgattgtgacatcctctattgctgcagttctgaacaatgggaagcttcgaactcctgatgttgttgttgatgagacatggttttctgatccagaagtctgtaaggaattgaagctttggtatccactctctaaaaccttagcggaagaatctgcttggaagtttgcaaaagatcatgggattgacatggtttccataaaccctgcaatggtgattggacctcttttgcagccaacacttaattcaagttcttcaatcattctgaatctgataaacggagcgaaaacatatacgaacgcagcttatggattggtagatgttagagatgttgcaaatgcacatattctcgcatttgaggttccttcagctactggaagaatttgtttagctgagaaagtttgtcacttttcagagatggtggagatcttacatgagctttacccagacatccaacttcctacaaaatgtgccaccgatgagccatttgtccaaccctatcagctttgtacagagaaggccaggagcttgggcattaattttactcccattggagtcagcctcaaggaaacggttgaaagcttgaaagcaaagaagtttgtcaacttgtga

SEQ ID NO: 431 - protein, 471 aa, Papaver somniferum; identical to SEQ ID NO: 6

SEQ ID NO: 432 - protein, 320 aa, Papaver somniferum; identical to SEQ ID NO: 12

SEQ ID NO: 433 - protein, 313 aa, Papaver somniferum; identical to SEQ ID NO: 16

SEQ ID NO: 434 - DNA, 1071 bp, Argemone mexicana
atgggtgtaaatgataaacaagatcaaaatcaagaggttgacattaaagatcaagctcatctctggaatataatttatgggtttgctgattcacttgttcttcgttgtgcagtagagattggaattgcagatattataaaaaacaataatgggtcaatctctgtttcagaacttgcatcaaaactcccaatttcaaatgtaaattctgataatttatatagaattctaagatacttagtacatatgagtatcttaaaagaagaaacatcatcagacattaatggtggaaacaagctttactcacttcaaccagttggtactttactcttaagagatgcagagagaagtatggtacctatgattttaggtatgactcaaaaggattttatgattccatggcattttatgaaagaaggattaggaaatggggaaacagcatttgagaaaggaatgggaatgacaatatgggaatatttagaaggtcatcctgatcagagtcaattatttaatgaaggaatggctggagaaacaagacttctaactaaatcattaattaatggttgtagagatatttttgaaggtttaaattctcttgttgatgttggtggaggaaatggaacaacaattagggctatttataatgcttttcctcatataaaatgtaaactttatgatctacctcatgttattgctaactctcttgatcaaccaaatattgaatgtattcctggtgatatgttcaagtttgttcctactgctcaagcaatcttactcaagttgatcttgcatgattggactgatgaagagtgtgttaacattctaaagaagtgtaaagaagcaataccaaaagaaacagggaaagtaatcatagtagatgtagcacttgaagaagaatcaaaacatgaacttacaaagacaagattgattcttgatattgatatgttggtaaacactggtggtagagaaagaactgcagatgattgggaaaatttgctgaaacgtgcaggttttagatctcataaaattagatccattgcagctattcagtctgtcattgaagcttatccatag

SEQ ID NO: 435 - DNA, 1074 bp, Argemone mexicana
atggaagtcaacaagattgatcaagaaaaccaatcaaaaatttggaaacaaatttatggttttgcagattcattagttcttaaatgtgcagttcaattagaaattgctgaaacaattcataatcatggaaaacccatgtctctatctgaattagcttcaaaattaccgattcaacccattaatttggatcgtttatacagagttatgcgttatttagttcatatgaagctcttcaacaaagaaattatcaccattaatggagatatcaataatacagaaacagtgattaaatactcattagctccacctgcaaaatatttaataagaggttgggaaaaatcaatggttgcttcaatattagcaattaatgataaagatttcttagcaccttggcatcatttaaaagaaggtttaactggtaattgtgatgcttttgagaaagcattaggtaaaagtatatgggtttttatgagtgaaaacccagaaaaaaataaactttttaatgaagcaatggcttgtgatactagattagttacttcagctttagttaatgaatgtaagaatattttttgtgatgatggaattaaaaccctagttgatgttggtggtggtactggtacagccatgaaagctatttctaaagcttttccaaatatcaattgtactatttatgatcttcctcatgttattgctgattctcctgagatcccaaatattactaaaattgctggagatatgttcaagtctattccttctgctgatgccatcttaatgaagtgcatccttcatgattgggatgatgaggaatgcattaaaattctaaagttatgtaaagaagcagtaccaagaaaaggaggaaaagttattatagttgatgtggtgttaaacatggatatgactcatccatattcaaagattagattgacattggatttagatatgatgcttaacactggaggaaaagaaagaacagaagaagaatggaagaaattatttgatgctgctggttttgctacttataaaattactcaaatttctgcagttcaatctgtaattgaagcttatccttattaa

SEQ ID NO: 436 - DNA, 1053 bp, Berberis thunbergii
atggagttgaatggaaaggatgagtctgtagacattaaagcacaagctcatctatggaagatcatatatggctttgctgattcccttgtccttcgatgtgctgtagagcttgggatagcggatatcatcaacgacaacaaccagcctatcacactccctgaccttgctgccaaactcccagtctccaatgtgaattttgatcacttgtatcgaattcttcggtacttagcccacatgaagctgatcaaacaagaggagaaacgaggtgttacactctactcacttgaaccaattggaacaatgttggtaaagaatgcaaagagaaacatggttccaattatccttggaatgacccaaaaggacttcatgacttcatggcatttcatgaaggatggtttgagcaacgacggtaccactgcctttgagaaggggatggggatgaccatatgggagtatcttgaaggtcacccagagcagagtcagttgttcaatgaagggatggctggtgaaactaggcttcttacttcttcactcattaatgggagtagagacttgtttaaaggtatcaattctcttgtggatgttggaggaggcaatgggactaccattaaggccatatctgatgcttttcctcatattaagtgcacactatatgacctccctcatgtcgtcgccaactcttatgatcttcccaatgttgaacgcattcctggggacatgtttcaatctgtgcccagtgcccaggctatcttgctcaagctaattttgcatgactggagtgatgaggactgcatcaagatcctaaagaaatgcaaggaagcagtgccaaaagagggagggaaagtgataatagtggatgtggcattggatgaggagtctgatcatgagcttaccagtacaagattgatccttgatatagacatgttggtgaacactggtggtaaagagaggtctaaggaagattgggacaagctcatcaaagctgcaggctttaaaggattcaatatcaggcacattgctgcagtacagtctgtgattgaagtcttcccatag

SEQ ID NO: 437 - DNA, 1062 bp, Berberis thunbergii
atggctgctaattctgaaatggtggaagaaaacatcatagctaaccaagctaagctctggaactccatctatggattttcagagacatttgtgttgagatgtgcagtagagcttgacattgctactatcattcacaaccatggaaagtccatgacactctctgagttagtttcacagctcacagtgaaacaaccggttaactcagatagtttgtcccgattgatgcgatacttggtatacatagacatcttcactgatacagtagatgtagacagagaaaccagatatggacttgcaccacttggtaaatttttggttaaagggtcggatcactgcgtggttgaggaaatgttggtggtcactgataaggagttcatggctccatggcaatgcatcaaggatggcatcacagatggcagcaagactgcttttgaaaaaacatttgggatgaatatatgggagtacatgggaaagcactcggaaaagaatactaccttcaatgaattcatggcaagtgactctagaatcatgtcatcagagttggtaaacaaatgcaaagataagttccaagggttaaattccttagtggatgttggcggtgggactggaactactgctaggagtattgccaaggcatttccaagcataaaatgcacagtttatgatctacccatcgttcttgccgattcccttgtttgccctgaaattactcaagtctcgggtgacatgtttaagtttgtaccttctgcagatgccgtcctgttgaagtacattcttcatgattggggtgataaagaatgtattgaaatcctaaagagatgcaaagatgcagtgcccaaagatgttggaaaggttatcatcatagacactgtactagatgtgaagtcagaccatccttacacaaagttaaaacttagtttggatctagacatgatgattaacacaggagggaaggagaggagtgaagaggaatggaagacactcatccaagctgctggatttaaaaactacaatataactcaattatctgctctaccttcagtcattgaggcttttccctag

SEQ ID NO: 438 - DNA, 1050 bp, Chordyalis celanthifolia
atgggtgtcaatgatatagctgaagttcaggatgttgacctcaaagctcaagctcatctatggaacataatctatggattcgccgattcgctcgtccttcgttgcgcagttgagctcggaatagcagacattatcaatagcaacaatgggccagtcacaatctctgaaatcgcatcgaaactcccggttgacaatgttaataccgataacttatatcgggttttacgttatttagtctacatgggtctcttgaaagagtcccaaaataagtgttactcattagaaccagttgctactttgctcttgaaagatgctcagagaagtatggttcctatcattctaggaatgactcaaaaggatttcatggttccttggtttttcatgaaagaaggattgggtagtgggagtagtactgcatttgagaaaggtatgggaatgactctttgggagtatttggaaggacacccagatcagagtcaattgtttaatgaaggaatggctggtgaaactagatttttgacttcttcgcttatcaatggttgtcgtgacactttcgaaggtttaacttctcttgttgatgttggaggaggaaatggtacaaccattaaaggtattcatgatgcatttccccatattaaatgctctgtctatgatcttcctcatgtcattgctaatgctcatcctcaccccaacatcgaacgaatccctggagacatgttcaagtctgttccaagtgcacaggcaattttactcaagctgatcttgcacgactggactgacgaagaaagtgtgaacattctaaagagatgcagagaagcagtacctaaagaaggaggaaaagtgattatcgttgatgtagcactggaggagggatctcaacatgagcttacgaagacgagattgatacttgatattgatatgttggtgaacacaggtggaagagaaaggagtgtggatgattgggacagaatgctcaaacttgcagggtttagtagtcacaagatcaggcacattgcagccattcaatctgtcattgaagccttcccatag

SEQ ID NO: 439 - DNA, 1044 bp, Chordyalis celanthifolia
atggaagtgatcaagaagagtgatcaagcagatcaagccaaactctggaagttcatctatggatttgccgattcactagttcttaaatgcgcggtcgagctagaaatagccgatacgattcataagcacggggaaccgatgacgctttccgaattagctactaaacttcctaaacaacccatcgatacggaccgtctatatcgaataatgaggtacttggttcaaatgaagttgtttacaaaagagacttctcaatccggggaagtcaaatatgggcttttacccccagcaaaatttgtggtaagaggatggcagaattccatggttggttcattgctagcaatcaatgataaggatttcattgcaccttggcattatctcaaggatggtttgggtggcgaatgtgatgctttcgagaaggcattaggaaagaaaatttgggattatatgtccgaaaaccccgaaaagaatcaacttttcaatgaggctatggcttgtgatactaggcatatccttatttcggcgttgattaaagattgtaaggatgttttcaaaggaattaagacacttgttgatgttggtggtggcaccggaaccgcggtgaaagcgatttctgatgcttttccggatataaaatgcgcggtttatgatcttcctcatgtgattgcggattctcctgttgctcctaatatcgatcgaatcgaaggcgatatgttcaagtccatcccaaatgcagatgccatctttatgaagtgcatcctccatgattggaacgacgacgaatgcattcaaatacttaagcaatgcaaaaaagcgctacaagacggaggtaaagtaatcatcgtagacgtggtgttgaatgtggattcgaaacatccttacacaaaaatgagattgactttggatttggacatgatgctcaacactggagggaaagagagaacagaggaggaatggaaagaactgtttgaagctgcaggtttcagtggatacaaaatcattcaaatatcagctctacaatccgtgattgaggcttatccttaa

SEQ ID NO: 440 - DNA, 1059 bp, Chelidonium majus
atgggtgtgaatgatatggcagtatctcaagaggttgacatcaaagctcaagctcatctctggaacatcatctatggctttgctgattctctagtcctccgttgtgcagtagagattggaattgcagatatcatcaagaacaacaatgggtcaatctctgtttctgaactctcatcaaagctcccaatctcaaacgtcaattctgataacctctaccgtgtcctaagatacttggtacacatgggtatcttgaaagaagattcagacattaatggtgtcaagctttactcactccaaccagtagctactctgcttttaagagatgcagagaggagcatggtacccatcattttagggatgacccaaaaggatttcatggttccatggcattttatgaaagaagggttaggagatggaagcactgcatttgagaaagggatggggatgaccatttggcagtacttggaaggtcatccagaacagagccagttgttcaatgaagggatggctggggaaactaggttactgactaaatcacttattgagggttgtagagatacatttgaaggtttgacatctcttgttgatgttggaggaggaaatggcacaacaattaaaggaatttatgatgcatttccacagatcaaatgctctgtttatgatcttcctcatgttattgctagctctcctgagcacccaaatattgaaagaattcctggtgatatgttcaaatctgttcctagtgctcaagctatcttactcaagttgatcttgcacgattggactgatgacgagtgtgtcaacattctaacaaagtgtagggaagcagtaccaaaagagacagggagagtgatcatagtagatgttgcacttgaagaagagtcccaacatgaactcacaaagacaagattgatactagatattgatatgttggtgaacactggtggtagagagagaactgaagatgattgggaaaagttgctcaaacgtgccggctttagaggtcataagatcaggcacattgcagctattcaatctgttattgaagccttcccatag

SEQ ID NO: 441 - DNA, 1071 bp, Chelidonium majus
atgggaagtagcagtatagatgtgaaaccagctgaaacacaagaagttagcatcaaagatcaagctcaattatggaatatgatctacggttttgctgattctcttgttgttcgttgcgcagtagagcttggcattccagatattatcaaaaacaataacgggccaatcacacttgcacaactttcatcaaaactcccaattccgaatgtcaactcggatcacttgtacagaattgtaagatatttaataaacctgaatatcttacaacaagaaatttgtcgtaatgttaaggtctactcacttaaaccagttggtactttacttttaagagatgcagaaagaagtatggtgccaatattattaggcaatacacagaaagatttcttggttccatggcatttcgtgaaagaaggtttagtaaatggaagtacaacagcatttgagaaaggaatgggtatggatatatggaagtatttagaaggtaatccagatcaaagtcagttgtttaacgaaggaatggctggagaaacaagtcttttaactaaaactctaatcgaagattgcagagatactttccaaaatttggattctctagtcgatattggtggaggaaatggtacaacaattaaggcaatctatgaagcttttcctcatatcaaatgtacgctttatgatctaccacatgttgttgccaactctcatgatctccctaaaatcgaaaaagttcccggtgatatgttcaagtctgttcccagtgctcaggctatcttactcaagttgattttgcatgactggactgatgaagagtgtgtcaacatcctaaagaagtgcaaagaagcaataccgaaagagacagggaaagtgattatagtggatgtagcacttgaagaagaatccaaccatgaacttacaaagacaagattgattcttgatattgacatgttggtaaatactggtggtagagagagaactgcagatgattgggaaaatttgctcaaacgtgcaggctttcggtctcataggataagacccattcgcgcaattcagtctgtcatcgaagccttcccttag

SEQ ID NO: 442 - DNA, 1110 bp, Cissampelos mucronata
atgacagtgctggaggggctaaccatctctgtcctctgcactcccattacttcatttggtaagaataccatggaagaagccatggatgtccatgagcaagcacacctgtggaagctcatctacggcttcgtcgacaccttagtagtaaggtcggcggtggagctcggaatcttcgacatcatcaacaacaatttgaagcccatgacagtgctggacttggcctcaaagctccccatctccaacccctgttcggatcggttgtatcgaattcttcgatacctagttcatgtccgccttctcaaggtgaccgatatcgatggcctcaagcgctactcgatccaacccgtcgcgaggttcctactaagggactacgacaagagcatggcgcctatcattctgggcatgactaagaaggagttcatgtcttcatggcaccacattaaggatggattgagcgacgacgggagcaccgccttcgacaaggccatggggatgagcttcttcgagtacttggaggagaaccccagccagagcaagctcttcaatgaggccatggcgggggagactaggcttctcactgcttccctcatcaatgactgcaaagacatctttcaaggaattgagtccctggttgatatagggggaggaaatggcaccaccattaaggccatttccgatgcgtttccgcacatcagttgcgccctcttcgacctccctcatgtcgtcgctgactccaacgatgatcacccgaatattaaacgcgtcgctggagacatgttcgagtccatccctacctcccaagccatcttgctcaagttgattttgcacgattggagcgacgaagattgcgttcggattctaaagcgatgcagggaggcggtgccgaaggaaggggggaaggtgatcatagtggatgtggcattagaagaggagtccaagcatgagctgaacaatccaaggttggttttagacattgatatgttggtgaacactggagggaaagagaggagcagagaggattgggagaagctcaccaaactagcagggtttggagggtacaagattaggcacattgctgctatacaatcagtcattgaaatcactccttaa

SEQ ID NO: 443 - DNA, 1032 bp, Cissampelos mucronata
atggaagaggaaatgaaagcacaagcccaggtgtggcgctacgtgtacggcttcgccgactccctcaccctcaagtgcgccatccagctggacatccccgacatcctccaccggcacggccgccccctctccctctccgccctcgcctcccgcctccccctccccaccgtcaaccccgaccgcctccaccgcctcatgcgctacctcgtccacatgggcctcttcgacctggtcccttcccccgacgagcccgcctacgcctccaacccttcctccgccctcctcgtcaagggccagcccaagagcctcgcctccttcgccctcctccagtactacgagatggacgcctggcaccacctcagcgccgccgtcgagggctccgtcaccccctgggagaggtgccacggggtcgactacagggagtacttcgccaaggaccccgtggccaaccagctcctcagcgacgccatgaccagccataccagcatggtcacggaggcgctggtggagggctgcaggaaggccggggcgctggacggggtgcgctcgtttgtggacgtgggcgggagcacgggggtggccgcgagggccgtggcgaaggccttcccggggatcaagtgctcggtgtttgatctgcctcatgtgatcgccaccgcgccggagtgtcccgaggtggagaggattgaaggggacatgttcgcgtcggtgccggagaccgatgtggtcttcatgaagtcggtgttgcatgattggggagatgaggattgcgtgaagatactaaagaaatgcaaggaagcgatagcggggaaggagggagggaaagtggtgatattagacatagtgttggatgtagaatcgagttacgagttcaagggggcgaggttggggatggagatggacatgttggtgacagtgggagggaaggagaggagcgaggcggaatggcagaagttgatcaaggatgcaggttttagccggtacaagatcacacccattgttgccattgaatccattattgaagtcttcccttag

SEQ ID NO: 444 - DNA, 1029 bp, Cocculus trilobus
agaccaagcagcccaagcccagctgtggaagttcatctatggctttgcagagtcactagtcatcaaaagtgcaattcagcttgacatcccagacatcattgacaaccatggcaagcccatcaccatctccgagcttgcttctcggattccctcgcaaggccccgttgaccacgaccgcttgtatcgaatcatgcggtacttggtgcacatgaagctcttcacaaaagagtccatcgacggtgaagatcaatatgggcttgcaccaccagcgaaatacctagtgaaggggtgggagaaaagcatagtgccttcaattctatgcattactgataaggaattcatgtcaccatggtaccatctcaaggaaggtttgtctaatggcgacaaccagaccgccttcgagaaggctttgggggtaaacatatgggattatatgtctaagaacccaaagaagaacaacatcttcaatgaagccatggcttgtgatactaggcttctcatgtctgcattggtgagtgaatgtaaggacatgtttcaagggattaagtcattggtggatatcggcggtggcaccggaaccgctgttaggtacattgccaaggccttccctcatataaactgcactgtttatgatctccctcatgttgctgctgattctcctacttatcccgaagtgaatcgcatcgaaggtgacatgtttaagtacattcctagtgctgatgccatcctaatgaagtgcattcttcatgattgggccgacgaggaatgcattcagattctgaagaagtgcaaagaagcattgccaagtactgggggaaaggtgatccttgtcgatatcgtgctaaacgcatattcggagcatccatactcaaagatgaggatggtgatggacttggatatgatgctgaactgtggaggraaagagagaacagaggaggagtggaagaagctcatctatgcagctggttttagtaggtacaatataaggcaagtcaatgccatacagtctgtcattgaggtttacccttg

SEQ ID NO: 445 - DNA, 1032 bp, Cocculus trilobus
atggaagaagaaatgaaagctcaagcccaagtgtggagatacgtgtacggtttcgcggagtcactgactctcaaatgcgcgattcaactcaacatcccggacatcctccatcaacacggccgacccatgactctctccgagttagcctctcatctccctctccccaccgtaaaccaagaccgattattccgagtcatgcgttatctcgtccatatgggcctattcgacctagtcgactcgcccgattcaaagaaatactccctcaactcggcctcaaagctcctcatcaaaggccaagacaagagtttggcatccttcgctctcctacagtactacgagatggacgcctggcaccacctcagcgccgccgtggagggcggagcgacgccgtgggagaagtgccacggcgtggattacagagagtacttttccaaggactcggtggcgaatcagttgttgagtgatgccatgacgagtcatactagtatggtgaccgaggcgttggtggagggctgtaagaaggctaatgtgctcgacggagtccgatcgtttgtcgatgtcggtgggagcaccggtgttgcggctcgagccgtggccaaggcctttccgaacgtcaaatgctcggtgtttgatttgcctcatgtgatcgccactgcgccggagtgccccgaggtgacgaggatcgaaggggacatgtttgtctccatccctgaaacggatgttgtcttcatgaaatcggtgctgcatgattggggagatgaggattgtgtgaagatattgaagaaatgcaaggaagcaatagcagggaaggatggaggaaaggtagtgatattggacatagtattggatgctgagtcgagttatgagttcaagggggcgaggttggggatggagatggacatgttggtgactgtgggagggaaggagagaggtgaagaggaatggcagaaattgttcaaagctgcagggtacagtcgttacaagatcactcccatcgtggccattgaatctgtcattgaagtgttcccttag

SEQ ID NO: 446 - DNA, 1062 bp, Eschscholzia californica
atgggtttagaatttaatgaagaagttgatatcaaagctcaagctcatctatggaacataatttatggatttgctgattcattagtccttcgttctgcagttgagttaggaattgcagatatcatcaagaacaacaatggttcaatcactgtatcagaacttgcatcaaaactccccatctcaaatgtcaattctgataacttatatcgagttttaaggtacttagtacacatgggtatcttaaaagaaaccaaatccaccattaatggaggagaaattaagaagctttactcacttgaaccagttggtagtttactagttaaagatgcagaaagaaatatggtacccattgttttagggatgacccaacaagattttatgattccatggcattatattaaggaaggattgggtgaaggaagtactgcttttgagaaaggaatgggtatgacactttgggaatatttagaaggtcatcctgaacaaggtcatttgtttaatgttggaatggaaggtgaaactagacttttgactaaaaccctaattgaaagttgtaaagatacttttgaaggtttgagttctttggttgatgttggtggtggaaatggtacaacaattaaggcaatttctgaagcatttcctcatataaaatgtagtctttatgatcttcctcatgttgttgctgattctcatgatcttcctaatattgaaaagatccctggtgatatattcaagtttatacctaatgctcaagctatcttactcaagttgatcttgcatgattggagtgatgaagactctgtcaagattctaaagaagtgcagagaagcagtaccacaagatacaggaagggtgatcatagtagatgtagccctagaagaggaatcagaacatccactaacaaaaacaagattggttcttgatgttgatatgttagttaatactggtggaagggagagaagtgaagatgattgggcaaaattactcaaacttgcaggttttcgaactcacaagataaggcatattgctgctgttcaatctgttattgaagctttcccttag

SEQ ID NO: 447 - DNA, 990 bp, Eschscholzia californica
atggaaatggaaggagcagacaagattgatcaagcaacccaagccaaaatttggaaacacatctatggttttgcagaatccctagttataaaatcagcagttgaacttgaaattgctgatacaattcacaaccatggaaaacccatgactctatccgagttagcttcaaaattacctgttcaacccgttgacttagaccgtctttaccgagtcatgcgttatttagttcatatgaagcttttcaagaaacaagaagatgaagaagaatcaattaagtactctttattaccaccagccaaatttctgattaagggttgggagaaatcaatggtgagtgcaattcttttaatcaatgataaagatttcatgtctccatggcatcatttgaaagaaggattagtgaataattctaatgcttttgataaagcattagggaaaagtatatgggattatatgagtgctaatcctgataaaaacaaggtttttaatgaaggtatggcttgtgattctagattagtatcatcagctttagttaatgagtgtggaaatattttccaaggaattcaaactcttgttgatgttggtggtggaactggaactgctgtcaaagctgtttcaaaggctttcccacatattaagtgtagtatttatgatctcccccatgtgatttctgattcccctgatattcctaatattgtcaaaattgagggagatatgttcaaatcaattccaagtgctgatgccattctcatgaagtgcatccttcacgattggaacgatgaggaatgcattgaaattctaaaaaaatgcaaagaagctgtgccgaaggaagggggtaaagttattatcgtcgatatagttctagacatggaatcaaaacatccttattccaaggttagactaactctagatttggatatgatgctcaatactgaaggaaaagagagaacagaagaagaatggaagaaattgattgatggtgctggtttt

SEQ ID NO: 448 - DNA, 1062 bp, Glaucium flavum
atgggtgtcagtgataacaaaccagaatctcaagaggtggacatcaaagctcaagctcatctctggaacatcatttacggatttgctgattctctagttcttcgttgtgcagtagaaattggaattgcagatatcatcaagagcaacaacgggtcaatctctgttacagagctagcatcaaagctcccaatcacaaatgtcaattctgataacctctaccgtgttctaaggtacttggtacacatgggtatcttgaaagaagtttcagacagtaatgaagtcaagctttactcacttcaaccagtagctactctgctcttaagagatgcagagagaagtatggtgcccatcattttgggaatgacccagaaggatttcatgattccatggcatttcatgaaagaaggattgggaaatgatactactgcatttgagaaagggatggggatgacaatttggcagtacttggaagggcatccagaacagagcaatttgtttaatgaaggaatggctggtgaaactaggttactaactaaatcacttattgatggttgcagagatacttttgaaggtttaacttcactttgtgatgttggaggaggaaatggaacaactattaagggaatttatgatgcgtttcctcaaataaaatgctctgtttatgatcttcctcatgttattgctagctctcctgaacacccaaatattgaaagaattcctggtgatatgttcaagtctgttcctagtgcccaagcaatcttactcaagttgatcttgcacgattggaccgatgaagagtgtgtcaacattctaatcaagtgtagagaagctgtaccaaaagacacaggaaaagtgatcatagtggatgtagcactagaagaagagtcccaacatgaacttacaaagactagattgatacttgatattgatatgttggtgaacactggtggtagagagagatctgaagatgattgggaaaagttgctcaaacgtgcaggctttagaggtcacaagatcaggcacattgcagctattcaatcagtcatcgaagccttcccatag

SEQ ID NO: 449 - DNA, 1062 bp, Glaucium flavum; identical to SEQ ID NO: 448

SEQ ID NO: 450 - DNA, 1062 bp, Hydrastis canadensis
atggatgccaatggaaataaggatcatgaatcatcagacatcaaatctcaagctcatctttggaagatcatatatggttttgctgattcccttgtccttcgatgtgccgtcgaattagaaatcttcgatatcatcgacaataacaaccagcccatcacagtctcggagctggcctctaagctccctattgccgatgtcaattccgataatctatatcggattttacgttacttggttcaaatgaaaatattgaaattaaacaaggttgttgatgatggtgtcaacaagtattcacttcaacccattgctgctttgctccttaggaattctaagaggaatatggttccaatcatccttggaatgactcaaaaagattttatgacttcttggcattctatgaaagatggtttaagtaacaatggtactgcttttgagaaaggaatggggatgactatatgggagtatttagaaggtcatcctgaacaaagtcaattgttcaatgaaggcatggctggtgaaacaaggctcttgacatcttcactcatatctgggagtaaagatatgtttcaaagtattcattcacttgtagatgttggtggtggtaatggtactactattaaggccatttctgatgcttttcctcatatcaagtgcaccctttttgacctccctcatgtcattgctaatgcctatgatcaccccaatatcgaacgcatcccgggtgacatgtttaaatccatgcctagtgcccaagccattttactcaagctaattttgcacgattggagtgacgaagattgtattaagattctaaagagctgcaaggaagcagtgccaaaagatggagggaaggtaattatagtagatgtagcattggatgaggaatcagaccatgagcttaccagcacaagattgatccttgatattgatatgttggtgaacactggtggtagagagaggagtaaagaggattgggaaaagcttgtcaaatgtgctgggttcaaaggttgcaaaatcaggcacatagctgctgtacaatcagtgattgaggtctttccttag

SEQ ID NO: 451 - DNA, 2142 bp, Hydrastis canadensis
atggagatcaaaatggagggggttgaagggcatgagttacttgaagctcaagctcatatatggaaccatacattcaacttcataacctctatgacactcaaatgtgcagttcaattaggcataccagatattatctacaaccatggccaacctatcactctctccgagttggtgaaggcactttcaatccaccagatgaaatcagattacttgtaccgcctaatgcgcatattggttcactctgaattctttgccatacaaaaaattcatgaagatcaagaaggatatgtgctgacaccatcatccaagtatctcttgaagaatcaactgacaaacttgtcgccgtacatattaatggtgctagatcctgtcttagtaacaccttgtcatttcatgagtgcctggttccaagggaatgaatctacaccatttgaggtcgctcatgggatgagcttttgggaatactgtggccaacaccctgatatcagaaagtacttcaataaagcaatggctagtgatgcagaattggtgatgaccgtggcttctaaagagtgtaaaacgatgttcgaagggttcaaatcattggttgatgtagggggtgggacaggaacgatggccaaggctatttccaagtcattcccacacttgaaatgtactgtttttgatcttccctatatagtttcaaacttgcaaggaagcgaaaacatagaattcgtcggtggagacatgtttgagtctgtccctcctggagatatattcctactcaagttgattttgcacgattggaaggacgaagaatgtgtgaatatactaaagcgatgtagggaagcgatttcattagagaacaaaggaggaaaagtgattataatagacatgattgtggatgacaacagaggaaaatatgaatcaactgaagcacaactctgctttgacatgttgctgatggttttggtcactggaaaagagagaactgagagtgaatgggagaagctcttcctagaggctggttttactagttacaagataactcctgctttgggtctaaggtccttcattgaagtattcctgtagatggagatcaaaatggagggggttgaagggcatgagttacttgaagctcaagctcatatatggaaccatacattcaacttcataacctctatgacactcaaatgtgcagttcaattaggcataccagatattatctacaaccatggccaacctatcactctctccgagttggtgaaggcactttcaatccaccagatgaaatcagattacttgtaccgcctaatgcgcatattggttcactctgaattctttgccatacaaaaaattcatgaagatcaagaaggatatgtgctgacaccatcatccaagtatctcttgaagaatcaactgacaaacttgtcgccgtacatattaatggtgctagatcctgtcttagtaacaccttgtcatttcatgagtgcctggttccaagggaatgaatctacaccatttgaggtcgctcatgggatgagcttttgggaatactgtggccaacaccctgatatcagaaagtacttcaataaagcaatggctagtgatgcagaattggtgatgaccgtggcttctaaagagtgtaaaacgatgttcgaagggttcaaatcattggttgatgtagggggtgggacaggaacgatggccaaggctatttccaagtcattcccacacttgaaatgtactgtttttgatcttccctatatagtttcaaacttgcaaggaagcgaaaacatagaattcgtcggtggagacatgtttgagtctgtccctcctggagatatattcctactcaagttgattttgcacgattggaaggacgaagaatgtgtgaatatactaaagcgatgtagggaagcgatttcattagagaacaaaggaggaaaagtgattataatagacatgattgtggatgacaacagaggaaaatatgaatcaactgaagcacaactctgctttgacatgttgctgatggttttggtcactggaaaagagagaactgagagtgaatgggagaagctcttcctagaggctggttttactagttacaagataactcctgctttgggtctaaggtccttcattgaagtattcctgtag

SEQ ID NO: 452 - DNA, 1056 bp, Jeffersonia diphylla
atggaagtcaatggaaagactaatgaagctgtagacatcaaagctcaagctcatctatggaaaatcatctacggctttgccgattccctggtcctgcgatgcgctgtggagcttgggatagcagacatcattgataacaacaaccagcccatcacactctccgaccttgcatcaaagctcccacttcccagtgtcaatattgattacttgtatcgaatcatgcgttacttggttcacatgaaactattcaaagttgaggaaaatatcaatggtgtcaagcaatactcgctccaacccactggcactttgctcctaaggactgcagagaggaacatggttccaatggtccttgggatgactcaaaaggattttgtcaccccttggcacttcatgaaggatggtctaagcgacgatggcacagcctttgagaagggaatggggatgaccatatgggagtacctagaaggacatccggatcaaagccaactcttcaatgaaggcatggctggtgaaactaggcttctaacgtcgtctcttatatctggatgcggagacctttttaaaggtattacatctcttgtggatgttggaggaggaaatggtactactcttaaagggatatcagatgcatttcctcatatcaagtgcacactctttgatcttccttatgttattgctaactcttatgatcatccaaatatcgagcgcattgctggggatatgttccagtcagtaccaagtgcccaggccatcttacttaagctaattttgcacgactggagcgatgaggactgtattaagattctgaagaaatgcaaggaagcagtgccaaaagagggaggtaaagttataatagtcgacgtggcattggacgaggagtccgatcatgagcttactagcacgagattgatacttgatattgatatgttggtgaacaccggtggcaaagagaggactaaggaggactggaataagctcgttaaagctgcaggttttcgaggtttcaacatcaagcacattgcagctgttcagtcagtaattgaggtctttccataa

SEQ ID NO: 453 - DNA, 1056 bp, Jeffersonia diphylla
atggaagctaaaactgggtttgagatatcatcccaagcaaacctatggaacttcatctacggattctcaaactcactagtcctgagatgtgcagtagaactggatatagccaacatcattcacaaccatggaatgcctattacactatccgaattggagttactgcttccggtgcagcctgttaatacggccagcttgtaccgagttatgcgttacttggcacacatcaagatattcaccaaaacattggacgtagatggggagactagatacggacttacaccgtcggctaagttccttgttaaaggctgggatcaatgcacggtgggtgcaattttgggtatcactgataaggatttcatggccccatggcattacatcaaagatgggcttacaggtgacagtaagaagaccgctttcgagaaggcactaggaatggatatatggaaatacatgggggatcacccagaaaagaacaagctgtttaacgcagcaatggcatgcgattcgaggcttgctatgtcggcattgataaatgaatgcaaagataagttccaagagataacatccctggtggatgtaggtggaggcactggaactgctgccagaaacattgctcaggcttttccccatattaagtgcactgtctatgatctacctcatgtcattgctgactcccctgtctaccctgaacttaattctgttgccggtgacatgtttaagtgcgtcccaaatgccgacgccatcttcatgaagtgcatcctccatgattgggatgacaaggaatgtattgaaattttaaagcaatgtaaagaagcagttcccaaacaaggcgggaaagtcattatcgtcgacattgtactaaatatgaagtcagaccatccttacacaaaattgagactgactttagatttggacatgatgctaaacacgggtggaggcaaggagaggacagaggaggagtggaaaaaactattccaggctgcaggttttagaggatacaacatcactcaaatatctgcattgcaatctgtgatcgaggcttttccttattaa

SEQ ID NO: 454 - DNA, 1053 bp, Mahonia aquifolium
atggagttgaatgggaaggatgagtctgtagacatcaaagcacaagctcatctatggaagatcatatatggctccgccgattcccttgtcctccgatgtgcagtagagcttgggatagcagacatcatcaatgacaacaaccaacccatcacactccctgaccttgcatccaaactcccactctccaatgtgaatattgatcacttgtaccgaattcttcggttcttagcccacatgaagttgatcaaacaagaggagaaacaaggcgttacgctttactcacttgaaccaattggaacattgttggtaaggaatgcaaagagaaacatggttccaataatccttggaatgacccaaaaggacttcatgacttcatggcatttcatgaaggatggtttgagcaacgacgggacaaccgcctttgagaaggggatggggatgactatatgggagtatcttgaaaggcacccagagcagagccaattgttcaatgaagggatggctggtgaaactaggcttcttacctcttcactcatcaatgggtgtagagacatgtttaaaggtattaattctcttgtggatgttggaggaggaaatgggactaccattaaggccatatctgatgcttttcctcatattaagtgcacactatatgacctttctcatgtcgtggccaactcttatgatcttcctaatgtcgaacgcattcctggggacatgtttcaatctgtgcctagtgcccaggctatcttgctcaagctgattttgcatgactggagcgatgaggactgcatcaagatcctaaaaaaatgcaaggaagcagtgccaaaagagggagggaaagtgataatagtggatgtggcattggatgagacgtcagatcacgagcttaccggcacaagattgatccttgatatagacatgttggtgaacactggtggtaaagagagaagcaaggaagattgggacaaactcgtcaaagctgcaggttttaaaggcttcaacatcaggcacattgcagcagttcagtctgtgattgaagtcttcccttag

SEQ ID NO: 455 - DNA, 1050 bp, Mahonia aquifolium
atgggggaagaaaacatagccaaccaagctaaattatggaatatcatctatggctttgcagactcacttgtgctaagatgtgcagtagagctcgatattgctaatatcattcacaaccatggaaagtccatgacactctctgaactggcttcagtgcttccggtgaaacaacctgttaattcggatagcttataccgagtaatgcgttacttggcacacttaagggtcttcactaagacattggacgcagatggagaaaccagatatgggctcgcaccaccggcaaattttttggttagagggaatgataattgcatggttggctcactgatggggcttactgataaggaattcatggctccgtggcactacatcaaagatggtctgtcaggtgatgatggtaagactgcttttgaaaaagcattaggaatggatatatgggaatacatgggagagaacccagagaagaacaagttgttcaatgaagcaatggcatgtgacacgagactcgtattgtctgccttgatcaacgaatgcaaggacaaattccaagggttaaattctctggttgatgttggtggtggcactggaactgctgcccggaaccttgccaaggcattcccacatttgaagtgcacggcttatgatctacctcatgtcattgctgactcccctgtttaccctgaaatcactcaagtcccaggcgacatgtttaaggtcataccatatgctgatgccatcctgatgaagtgtatccttcatgactggggtgataaagagtgcattcaaatcgtaaagaaatgcaaagaagcactgcccaaagaaggtggaaaggttattatcgtcgacattgtactagatgtgaaatcagaacatccttacacaaagttgagacttactttggatgtagacatgatgctcaacactggtggagggaaagagaggactgaagaggagtggaagaaactcatccaagctgctggtttcaaaagctataacatcactcaaatatctgctctacaatcggtgattgaggcgtttccttattaa

SEQ ID NO: 456 - DNA, 1068 bp, Menispermum canadense
atgatcttggacaaccatgacaaagcagaagaagctttagtagtggatgtccatgaccaagcacacctatggaagctcatctatggctttgtggacaccttagttgttagatcagcagtagagcttggaatcatggacatcatctacaacaacaagaagcccatctcgctcttcgatctcgcctcgaagctccctgtctccaacacctgtccggaccgattgtaccgcatacttcggtacttggttcacgttcgccttctcagagtggcagaggtcgacggcttgaaaaagtacttgctcgctcctgctgcgaaattgctacttaggaacactgagaagagcatggtgcccatcattctaggcatgacccaaaaggattttgtggtgccatggcatcacataaacgatggtttggggagtgagggtgccaccgccttcgataagtccatgggaatgtccttctttgagtacttagaagagaatcctagccagagcaagctcttcaatgaagccatggctggtgagactaggctgttaacagcttctcttatcaatggttgcaaagacttgtttcaaggtattgagtctttggtggatgttggaggagggaatggcacaaccattaaggccatatctgattcttttcctcatatcaagtgtaccctcttcgacctaccgtacgttgttgcagattctcacgacgaccctaatatcaagcgcgtccatggtgacatgttcaagtccatccctagttcccaagccatcttgctcaagttgattttgcatgattggagtgacgaagattgtgtgaagattctaaagcgatgcaaggaagctgtgcctaaggaaggagggaaggtgataatagtagatgtagcactggatgaggagtctcagcatgagttgagtagcacaagattgatacttgacatagatatgttggtcaacactggaggcaaggagaggagcaaagaggactgggagaagcttatcaaatgtgcaggatttggagggtacaaaattaggcacattgctgctattcagtcagtcatagaggtcttcccatag

SEQ ID NO: 457 - DNA, 1050 bp, Menispermum canadense
atggacaccaccattaatggaagcttattagaagctgatcacaatctccaagtcaaagctcaggctcatgtatggaacaccatctacagattctcagattctctcatcctccgcgccgtcatcgatctcggcattctcgacatcatcaacagcaacaacaacagcatttcgctctctgagctcgcctcgaagctccctctccaccacgtccaccacgaccacatcagccgcatcctccgccacctgacccacatgaaaatcttacgagtggtcaccgctgacgacgacggagatgataacatgatcaccaagtactcacttgagcctctagtggcggcgctgctgcttaagagctcggagaagagcttggcatataatgtactaggcatgattcaaaaggagtttgttctcccatggcactacattaaggattgtttagtgggctgtgatgagagtacaatatttactactccttttgagaaggccatgggagtgacgttttgggagtacttggagggccatttggaggatagcaagaactttaatgagtcaatggcgagtgagactcggcttctcacggcttcgctgatcgacggctgccgggatgtttttgagagtgttgggtcaattgttgatgttggaggagggaatgggacgactttgaaggcgatttccaatgagtttccgcatatcaagtgtactctgtttgatctcccttacgtggtggctaatgcttgtgattgtccggggattgagtgtgtctccggcgacatgttcaaagccatacccagtgctcaggccatcttattgaagttgatattgcacgactggggggacgaggactgtgtgaagattctaaagagatgcaaagaagcagtgcctagcgatgtgggcaaagtgatcatagttgatgtagcattagaagaggactttgaagacgagctcactggagcaagattagctctagacatggacatgttagtgaccacaggaggcaaagagaggaccaaagaagactgggagaagcttgtgaagcgtgcagggtttcgt

SEQ ID NO: 458 - DNA, 1056 bp, Nandina domestica
atggcaatgaacggaaaggctaatgaatttgaagacatcaaagctcaagctcatctatggaaaatcatttacggtttcgcagactccctagtccttcggtgtgccgttgagcttggcattgcagacatcattagcaacaacaacaagcccatctcactctcctgcctagcatcaaagcttccacttccgcatgtcaacctcgatcatttgtaccggataatgcggtacttagttcacatgaaactactaaaactagtagtgaatgaaaacggtgaaaaactatacgcacttgaaccaatttcaacattgttgttgaaggatgcaaagaggaacatggttccaatggttcttggaatgactcagaaagattttgtgaccccatggcattacatgaaggatggtttgagcgacgatggtacggctttcgagaaaggtatggggatgaccatatgggagtatttacaaggacatcctgatcaaagccaattgttcaatgaaggaatggcaggggaaactaggctgctaacttcctcactcatatctggatgtggagacttatttaaaagtcttacatctcttgtggatgttggtggaggaaatggtactaccattaaagcaatttcagatgcttttcctcacattaagtgcacattatttgatctaccttatgtcattgccaactcttatgatcatcctgatatcgaacgcatttctggggatatgttcaaatctgttcctagtgctcaagccatcttactcaagctaattttgcatgactggagtgatgaagactgcattaggattttgaagcaatgcaaggaagcagtgccaaaagagggaggtaaagttataatagtggatgtggcattggatgaagaatctgatcatgagcttactagcactagattgatacttgatattgatatgttggtgaacactggtggtaaagagaggactaaggaggattgggataagcttgttaaagctgcaggttttcgaggtttcaacatcaggcacatcgcagccatccagtccgtgattgaggtatttccatag

SEQ ID NO: 459 - DNA, 1053 bp, Nandina domestica
atggaagtaatgaaggagcaagatgtatcagctcaagccaagatgtggaactacatttatggattttcagaaacactagttctaagatgcgcggttgagcttgacattgccaatatcattcacaatcatggaaagcctataactcttccagagttagcatcaaaacttccaaggcagcctgtcaattctgatagtttgtatcgagtgatgcgtcatttggcacacatgaagcttttcactaaaacaaaggtggacggagataccaaatatgagcttgcaccatctgctaagtttcttgttaaaggggctgataagtgtatggttggtgcactattggcaatcactgataaggatttcatggcaccatggcattacatcaaggatgggctaacaggtgatagcaagagcactgctttcgacaaggcattgggaatggatatatggacatatatgggaaagcatccagagaaaaaccagttgtttaatgaagcaatggcctgcgacacaaggcttgctatgtctgcgttggtaaatgaatgcaaagacaagtttaatgggataaaatccttggttgatgttggtggaggaactggaactgcagtgaggaacattgctaaggcatttccccacattaagtgtactgtttacgatcttcctcatgtcatcgctgactcccttgcttatcctgaaattaatcgcattgcaggtgacatgtttaagtccgtacctaaagcggatgccatactaatgaagtgcatacttcatgattgggctgacgaggagtgcattgaaattctaaagaaatgcaaagaagcagtgcctgaagatggggggaaagttataatcattgacattgtactgaatgtggaatcggatcatccttacacaaagatgagactaactttggatttagatatgatgctcaacactgggggaggcaaggagaggactgaagaggagtggaagaaactcatccaggctgcaggtttcagaagctacaacatcacccagatatctgccgtacaatctgtaattgaggcttttccttattaa

SEQ ID NO: 460 - DNA, 1050 bp, Nigella sativa
atggctttctatgcaaatgatgaagctctagacgtcgaagctcaagctcatgtatggaaaatcatctatggctttgctgattccctggtcctccgatgtgcagttgaactcgagatattcgacatcattggcaacaacaactccatccaactctccgagttggcctcgaagcttccagttgcaaatgtcgtcccggatcatttgtacaggctgcttcgttacttaatcaagatggaactactaagactggaaacctcaaacaagggtgtaaaagaatacacactccaacccactgcacggttgcttcttaggaatgaaaagaggagcatggttccaatgatacttggcaacacacagaaggatttcatgactccttggcactcaatgaaagatggtcttggccacagtggtactgcttttgagaagtccaagggaatgactatatgggagtatttggaaacacatccagatcaaagccaactttttaacaaaggtatggctgctcaaacgaggcttcttacttcttcactcatatctgtaaacaaagacatctttcaaagcatcaactcacttgttgatgttggtggaggtaatggtactactattaaagccatttctgatgcatttccacacattcagtgcactctctttgatcttcctcatgtcatagccaattcttatgaccaccccaatatccaacgaattggaggtgacatgttcaagtctgtgcctagcgctcaagccatcttactcaagttaattttgcatgactggagtgatgaggatagtattaagattttgaagcaatgcaaggcagccttgacggaaaatggaggcaaggtgattatagtggacgtagcactagatgaggactcagaccatgagctgagtagcacaaggttgattcttgatattgatatgttggtgaatactggtggcagagaaaggactaaagaagattgggagaggctggttaagtctgcagggtttagtggctgcaacatcaggcacatagcggctattcaatcagtgattgaggtctttccatag

SEQ ID NO: 461 - DNA, 1065 bp, Nigella sativa
atggaggagatgataaatggagatgaatcaaaagaaattcttaaagctcaagctcacatatggaagtatacattcaattacataacttccatgtccctaaagtgtgcagtccaattaggtatacctgatatcattgctaatcatggtaagcctctcaacctctctcagttggtgaatgaactctcaatccctcacctgaaatctccacatctataccggctcatgcgcatattggttcactctggcttctttgccattgaagaaggagaaggttatgtcttgacaccttcatctaagctgcttctttccaagaatcaaaacacaaacttgtcaccttttgtcctaatgatgatggatcctgtcttagttacaccatttcatttcctaactgattggtttcaagggaatcaaactacagcattcaaggtagctcatgggatggagatgtgggattattatggccaacactctgatgttaacaagtcctttgatgattcattggctggtgactcagggttggtgatgggtgttgtgcttaaacactggaaggagatgtttcaagggtttggttcattggtggatgtaggtggcagcacaggtagtgtagccaaggctatctctgaggtatttccactcatgaaatgcactgttcttgatcttcctcatgtcgtctctgacatgaaagggagtaaaaacttggaatttattagtggagacatgttcgagtacatcccccctgcagatataatcctacttaagtggataatgcatgattggagcgacgagaaatgcataaagatactaaagaattgcaaggaagcgatatcggaacacaaaggaggaaaagtggttgtaatagacattatactggatgaagaccaaggattaagaagaaatgattcagttgaaactcagctttgccttgacattttaatgatggtttcacatgctgcaaaagaaagaactgaggctgaatggaagaagctcttcttagatgccggtttctcaagcttcaaggttactcgtggtttgggtttaagatctatcattgaagtcttcccttag

SEQ ID NO: 462 - DNA, 1068 bp, Papaver bracteatum
atgggtagcttagcaaaaccagctgaaacacaagaagtttccatcaaagatcaagctcaactatggaatattatctatggttttgctgattctcttgttctgcgttgcgctgtagagattggaatcgcggatattatcaaaaacaatgatggggcaatcacacttgcacaacttgcttcgaaactcccggttccaaatgtcagttctgattacttgtacagaatggtgagatacttggtacacctgaacatcttagcacaagaaacttgtaatggcggagttgagaaggtttactcgcttaaaccggttggtacgctacttttaagagatgcagaaagaagtatggtgccgatgatattaggcatgactgaaaaagatttcatggtttcatggcatttcattaattcaggtttaggagctggaggtggggtggtttttgcgggaggaatgggaatggatatatggaagtatttagaaagtaatcctgatcagagccagttgtttaatgaaggaatggctggagaaacaagacttttaactaaaactctgatcgaagattgcagagatacttttcaaggtttggattcactggttgatattggtggaggaaatggtacaacaatcaaggcaatccatgaagcttttcctcatatcaaatgttcactttatgatcttcctcatgttgttgccaactctcatgatctccctaacatcgaaaaagttcccggtgatatgttcaagtctgttcccagtgctcaggctatcttactcaagttgatcttgcacgactggactgatgaggagtgtgtcaacatcctaaagaagtgcaaagaagcaataccgaaagagacaggaaaagtgattatagtggatgtagcacttgaagaagaatccaaccatgaacttacaaagacaagattgattcttgatattgacatgttggtgaatactggtggtagagagaggactgcagatgattgggaaaatttgctcaaacgcgcaggctttcgctctcataggatcagacccattcgcgctattcagtctgtcattgaagccttcccttag

SEQ ID NO: 463 - DNA, 1074 bp, Papaver bracteatum
atggatactttatatgccaacccagctgaaacacaagaagaaatcggcatcaaagatcaagctcaaatatggaatttaatctatggttttgctgattctcttgttcttcgttgcacagtagagattggcttaccagatattatcaaaaacaataatgggccaatcacacttgcacaactttcatcaaaactcccgattccagacgtcaattctgaccacttgcacagaattcttagatatttagtacacctgaatatcttacgacaagaaacttgtaatggtggagctgataaggtttactcacttaaaccagctggtactttacttctaagtgatgcagaaggaagtatgataccaatattattagggatgactgaaaaagatttcatgcttccatggcattttatgaaagaaggtttaggaaatggaagcacaacagcatttgagaaaggagtgggaatggatgtatgggagtatttagaagctaacccagatcaaagtcggttgtttgatgaaggaatggctgcaacaacaagacttttaagtaaaactctagttgaagattgtagaggtacttttgaaggtttggattctcttgttgacgttggtggaggaaatggtacaacaatcatggcaatctctgaagcatttcctcacatcaaatgtacactttttgatcttccacgtgttattgctagctcacataatcaccctaacatcgaaagagttccaggtgatatgttcaagtctgttcccattgctcaagctatcttgctcaagatggtattgcatgactgggatgatgaagcgtgtgttaaaattctaaagaagtgcaaagaagcaataccgaaggagacggggaaagtgatcatagttgatgcagcacttgaagaagaatctgaacacgaacttacaaagacaagattgattcttgatattgatatgttggtgaattctggtggtagagagagaactgcagatgattgggagattttgctcaaacgtgcaggctttaggtctcataggatcagacccattcgcgctattcagtctgtgattgaagccttcccatag

SEQ ID NO: 464 - DNA, 1059 bp, Sanguinaria canadensis
atgggtataaatgataagccagaatctcaagaggttgacatcaaagctcaagctcatctctggagcataatctatggctttgctgattctctagtcctacgttgtgcagtagaaattgggattgcagatatcatcaaaaacaacaatgggtcaatttctgttacagaactctcatcaaaactcccaatctcaaacgtcaattctgataacctgtatcgtgtcttacgatacttggtacacatgggtatcttgaaagaagattcagacaataatggagtcaagctttactcacttcaaccagtagctactctgctcttaagagatgcagagaggagtatggtacccatcattttaggaatgacacaaaaggatttcatggttccatggcattttatgaaggaaggtttaggaaatgggggtactgcatttgagaaagggatggggatgacaatttggcagtacttggaagggcatccagaacagagccagttattcaatgaaggaatggctggtgaaactaggttactgactaaatcacttattgaaggttgtaaggatacatttgaaggtttaacatctcttgtagatgttggaggaggaaatggcacaacaattaaggcaatttatgatgcatttcctcatataaaatgcagtgtttatgatcttcctcatgttattgctagctctcatgatctcccaaatattgagaggattcctggtgatatgttcaagtctattcctagtgcacaagcaatcttactcaagttgatcttgcatgattggactgatgaagagtgtgtcaacattctaaaaaagtgtaaggaagcagtaccaaaagagacagggaaagtgatcatagtggatgtagcactggaagaagagtcccaacatgaacttacaaagacaagattgatacttgatattgatatgttggtgaatactggtggtagagagagaactgaagatgattgggaaaagttgctcaaacgtgcaggctttagaggtcataagatcaggcacattgcagctattcagtctgtcattgaagccttcccatag

SEQ ID NO: 465 - DNA, 1047 bp, Sanguinaria canadensis
atggaagcaaacaagagtgatcaagcaacccaagctaaaatctggaaactcatctatggtttcgctgaatccctagtcctcaaatgtgcagtccaactcgaaatcgccgatacaattcataaccacggcaaacccatgactctatccgagttagcttctgaacttccgattcaaccagtcaactcagacagattatacagagtcatgcgttacttagttcacatgaagctcttcaacaaagaaaaaagcaccattaatggcgaattcaaatactcacttgccccacctgcaaaattcctgataaagggttgggagaaatcaatggtggcttcaattctagcaatcaatgataaggatttcttggctccttggcatcatttgaaggatggtttggttggggattgtgatgtttttgagaaagctttggggaaaagtatttgggtttatatgagtgagaatcctgagaagaatcagctttttaatgaagcaatggcttgtgatacaagattggttacttcagctttggtaaataattgtggaaatgttttccatggaattaaaacacttgttgatgttggtggtggaactggaactgctgtgaaagctatttccaaggctttccctcatattaaatgcactatttatgatcttcctcatgttattgctgattcccctgagattccaaatattgttaaaattgaaggggatatgttcaagtccgttccaagtgctgatgccatcctaatgaagtgtattcttcacgattggaacgacgaggaatgcattcagattctaaagaaatgcaaagaagcagtaccgcgagaagggggaaaggttatcatcgtcgatgttgtactaaacatggactcgacgcatccttattccaagattagatttacattggatttggacatgatgcttaacactggaggaaaagagagaacactggaagaatggaagaagctgattgatgctgcagggtttgctagtttcaaaataactcaaatgtctactgtccaatctgtaattgaggcttatccttattaa

SEQ ID NO: 466 - DNA, 1059 bp, Stylophorum diphyllum
atgggtgtgaatgatatggcagtatctcaagaggttgacatcaaagctcaagctcatctctggaacatcatctatggctttgctgattctttagtcctccgttgtgcagtagagattggaattgcagatatcatcaagaacaacaatgggtcaatctctgtttctgaactctcatcaaagctcccaatctcaaacgtcaattctgataacctctaccgtgtcctaagatacttggtacacatgggtatcttgaaagaagattcagacattaatggagtcaagcttttctcactccaaccagtagctactctgctcttaagagatgcagagaggagcatggtacccatcattttagggatgacccaaaaggatttcatggttccatggcattttatgaaagaagggttgggagatgggagcactgcatttgagaaagggatggggatgaccatttggcagtacttggaaggtcatccagaacagagccagttgttcaatgaagggatggctggggaaactaggttactgactaaatcacttattgagggttgtagagatacatttgaaggtttgacatctcttgttgatgttggaggaggaaatggcacaacaattaaaggaatttatgatgcatttcctcaaatcaaatgctctgtttatgatcttcctcatgttattgctagctctcctgagcacccaaatattgaaagaattcctggtgatatgttcaaatctgttcctagtgctcaagctatcttactcaagttgatcttgcacgattggaccgatgaagagtgtgtcaacattctaacaaagtgtagggaagcagtaccaaaagagacagggagagtgatcatagtagatgttgcacttgaagaagagtcccaacatgaactcacaaagacaagattgatactggatattgatatgttggtgaacactggtggtagagagagaactgaagatgactgggaaaagttgatcaaacgtgccggctttagaggtcataagatcaggcacattgcagctattcaatctgtcattgaagccttcccatag

SEQ ID NO: 467 - DNA, 1077 bp, Stylophorum diphyllum
atggcattgcaaagtgatgagcaagtgttgcattctcaaactcacatatggaaccatattttcagcttcataaactccatgtccctcaagtgtgcaatccagctagaaatacccgatatcattgaacgccatggtgcaccaatgttgctctcggagttagtagacgccctctccatcaacaaggaaagagccccttttgtctatcgactcatgcgtttacttgtccactccggcttctttgtgaaacaaaaagtatcggaagaaagtgaagaaggctatttgctagctcctgcttctcgctttcttctaaaggaagagccattaagcattagaccttttttactagccatgctcgatccaatagtgatggatccatggcaacacctgagcaaatggttccaaaacaacgatatcaaccctttttacacagctcatgggaagaatccttgggagcttctacgccataagccagagcttattcaattaaccaatgaaggatgggctagtgattcaagacttgttacaagtgtgattcttaagcaatctggtactggtagtgctttttttgaagggttaaattctattgttgatgttggaggtggtactgggacggtcgctaaagccattgctgacgcgtttccaaaactcagttgcattagtttcgatcttcctcaagttgtcaatggtttggttggtggtaagaatctgagctttattggtggcgacatgttccaagagattcctaaagctgatgcagttctcctaaagtggatactacacggatggaatgatgaggaatgcttaaagatattaaagcgatgcaaagaggcgattccaagcaaagaaaatggaggaaaagtgataatcatcgacatggttgtgaaagatcaccaagggccgggtgacgatgaatttatcaaggcacaacttttctttgatatgcttatgatggcatcgcagacgggaagagagcgaaatgaaaaggattgggcaaagctatttcttgatgccggatttagtgattacaaaatcactcacaatttgggatcaaggtctttcattgaagtttacccatag

SEQ ID NO: 468 - DNA, 1056 bp, Tinospora cordifolia
atggaagctgcaactttgaagcaagatcaacaggcccaagccaagatatggaagttcatctatggcttctcagaatcactagtccttaaatgtgccattgaccttgaaatcccagacataattcacaaccatggcacccccatctccctctcccaactctcttctcaaatcgctccggccaagcagcctgtggattctgaccgcttataccgaatcatgcggtacttggttcacatggggctcttcaccgaagagagcatctccggtgagctccggtatggacttgcaccaccggctaagtacctcgtgaaggggtgggagaaaagcgtagtgccctcacttttatgtatcaatgataaggacatgatgtccccatggcactacttaaaggatagcactgttgccggagacaaccggacggcctttgagatggccttaggagtgaatatatgggattacatgggaaagaatcctaagaagaacagtgtgtttaatgaagcaatggcttgtgatactaggcttcttatgtctgcaatggtgaatgagtgtaaagatatgtttcaagggattaagtctctagtggacgttggagggggcactggaactgctgttaggaacattgctaaagcctttcctcacatcaaatgcactgtctttgatctccctcatgttgccgccgattcgccagtttatcccgaagttaaccgcatcgaaggagacatgtttaagggcattccaagtgctgatgccatcctaatgaagtgcatacttcatgattgggacgacaaggaatgcatagagatcctgaagaaatgtaaggaagctgttccggaagatggggggaaggtgatcgtggtggacattgtactaaatgcacactcagatcatccttacacaaagatgaggatggttatggacttggacatgatgttgaactgtggtggcaaagagagaacagaagaggaatggaagaagcttatttacgcagctgggtttagtaggtacaatatcaggcaaattaatgcaattcaatctgttattgagatttacccttga

SEQ ID NO: 469 - DNA, 1026 bp, Tinospora cordifolia
atggaagaagaaaggaatgcacaagcgctagtgtggagatacgcttacggcttcgccgattcgctgactctcaagtgcgcgattcaacttggcatcgcggacatcctccaccaacacggccagcccatgactctctccgagttagcctcatcgctccctctcccaaccgtaaaccaagaccgactccaccgaattatgcgctacctagtccacatgggcctcttcgacctagtcgactcagacacaaaatacgcactcaaccccgcgtcaaccctcctcgtgagaacccaacccaagaacctcgcttctttcgctcttcttcagtactacgagatggacgcgtggcaccacctcagcgccgccgtggaaggccacgtgacgccgtgggagaagtgtcacggcaccgattacagagagtactttgcaaaggacgaggtagcgaatcagttgctgagcgacgccatgacaagtcataccagtatggtgacggaggcgctcgtggaaggttgcaagaagggtaaggtgcttgatggggtccggtcatttgttgatgttggtgggagcaccggcgtggctgctcgcgcggtggccaaggcttttccgtgggtcaagtgtgcggtgtttgacttacctcacgtgattgctaccgcaccggagtgcccgggggtggagaggattgcaggggacatgttcgcgtccgtgcccgaaaccgatgtcgtcttcatgaagtcggtattgcatgactggggagacgaggattgtgtgaagatactaaagaaatgtaaggaagcaattggtgggaagaaggaagggaaagtggtgatattagatatagtgttggatgcaaaatccagtaatgagttcgagggagcgaggctggggatggacatggacatgttggtgactgtgggaggcaaggagaggagtgaggaggaatggaagaagctgttcaaggattcaggttacagtcactacaagatcacccctatagtggccattgaatccattattgaactcttcccttaa

SEQ ID NO: 470 - DNA, 1047 bp, Thalictrum flavum
atggcggctttccaaggaaaggatgaatctgtagacatcaatgctcaagctcatgtatggaaaatcatctatggatttgccgattcccttgttcttcgatgtgcagtggaacttggcattttcgatatcattgacaacaacaaccagcctatcacacttgccgatttggcatccaagctccccatatccaatgtcaatttggataatctgtttcggattttacgttacctagtcaaaatggaaatactgagttatgcaggtgtgaataaatacgcgcttgaaccaattgcgaaattggtccttaggaatgaaaaaaggagcatggttccaatggttcttggaatgactcagaaagattttatgactccatggcattcaatgaaagatggtttaactgacaatggtgttactgcttttgaaaaggccatgggcatgactatatgggaatacttagaaggacatccagatcaaagccaactattcaatgaaggcatggcaggtgaaacaaggcttctgacatcttcacttatatctggaagtaaagatttgtttcaaagtattgatgcagttgttgatgttggtggtggaaatggtactactataaaagcaatttctgatgcatttccacatatcaaatgtaccctttttgatcttcctcatgtcattgctaattcatatgatcacccaaatattgaacgtattggtggtgacatgttcaaaggcatgcctagtgctcaagccatcttactaaagctaattttgcacgactggaacgacgaagacagtatcaagattctaaagcaatgcagaaaagcagtaccaaaagatggagggagagttataatagtggatgtagcattggatgaagattcagaccatgagctaagcagtacaagattgattcttgatatagatatgttggtgaatactggtggtaaagaaaggactaaggaagattgggagaagctggttaagtgtgcagggtttagtggttgcaaaatcagacacattgcagctatacaatcagtgattgagattttcccataa

SEQ ID NO: 471 - DNA, 1026 bp, Thalictrum flavum
atggaagacctctcatcacaagctaaactatggaactacatctatggttttgctgattcactagttctcaaatgtgcagtccaacttgatctagccaacttaattcatgaccatggcacccccatgactctttctgagttatcttcacgtcttcctagtcagcctgtgaatcaagatgctttgtatcgagtcatgcgttacttggtccatataaaactattcaccaaatcatcaatagatggtgaattaagatatggtcttgcaccaccagctaaattcctagtgaaaggttgggataattgtatgattggttcaattctattgatggttgatacggattttatggctctgtatcattatatcaaggatgagatattgaacgatggtagttccataaccattaccgcttttgagaaggccttggggactaatatttgggagtacttggcagagcaccctgagaaaaatcagctatttaatgaagggatggctaatgagagtaggctgtattgcagcagtacttttgaaggtttaactacacttgtggatgttggtggcggtactggaactactgtgaagtatattgctaaagcatttccaaatattaagtatactgtttatgatcttcctcatgttattgctgatgcccctggagacactgaaatcaattttgtccaaggagatatgttcaaatacataccaaatgctgatgctatcttgatgaagggcgtccttcatgattgggacgataacgaatgcattgaaatcttaaagagatgcaaacacgcagtgccaagagatggagggaaagttataattattgatgttgtgttaaatgtgaaatcagaacacccttacactaaaatgagattgactttggatttggacatgatgctcaacaataaaggaaaagagagaaccgaagaagattggaagaagctcatttatgatgatgcaggatacaaaggatacaaaataacacaaatatctgctcttcagtcagtcattgaagcttatccttattag

SEQ ID NO: 472 - DNA, 1053 bp, Xanthoriza simplicissima
atggctttccatggaaaagatgatgctctggacatcaaagctcaagctcatgtgtggaaaatcatctatggttttgcagattctctagtcctccgatgtgcagtggaacttggaatcgtcgacatcattgataacaacaaccaacccattgcacttgcagatttggcctctaagcttcctgtttccaatgtgaattgtgataatttgtatcggatattacgatacttggtgaaaatggaaatattgaggctggaaaattctgatgatggtgagaagaaatacgcacttgaacctattgcgacattgctttcaaggaatgcgaagaggagtatggttccaatgattcttggaatgactcaaaaagattttatgactccttggcattcaatgaaagatggcttaagtgacgatggtactgcttttgagaaggccatgggaatgactatatgggagtacttggaaggacaccctgatcaaagccaattattcaatgaaggtatggctggcgaaacaaggcttctcacatcttcactcatatctggaagtagagatatgtttcaaggtattgactcacttgttgatgttggtggaggaaatggtactactatcaaggccatttctgatgcatttccacacatcaagtgcaccctctttgatctccctcatgtcattgccaattcctatgaccatcctaatattgaacgcattggtggtgacatgtttaaatctgtgcctagtgcccaagctatcttactcaagctaattttgcacgattggaatgacgaagactcgatcaagattttaaagcaatgcagaaatgcagtgccaaaagatggagggaaagtgattatagtggatgtagcattggatgaggagtcagaccatgagcttagcagcacacgattgatacttgatatcgatatgttggtgaacactggtggtaaagagaggactaaagaggtttgggagaaaattgttaaaagtgcaggattcagtggttgcaaaatcaggcacatagcagctatacaatcagttattgaggtttttccatag

SEQ ID NO: 473 - DNA, 1065 bp, Xanthoriza simplicissima
gagatcattaaaggtgatggaacgaaagaggtacttgaagctcaagctcatatctggaactacacatttaactacataacttctatgtcactcaggtgtgctgttcaactaggcataccagatatcatcgacaaccatgacaaacctgtcaccctctctgagttggtgaaggcactttcattccctcaggtgaaatctgctcacgtttaccgcctaatgcgggttttggtgcactctggcttcttcactgtaggaaaaattcatgaacaagaagaggagtatatgttgacgccttcgtctaagctcctaatgaagaaccatgtgacaaacttagcaccattcctattaatgatcactgatcctgttattgcaaattcttgtcacttcatgacttccttgttccaggggtctgaggttttaccgattgaggttgcccatgggatgagtttatggaattactgtaaccaacaccctgaatttaaccagttgtttaatgatgcaatggctagtgacacaaatttcgtgttgagtgtagtggttaaagagtataaggcaatttttgaaggttttaggtccctagttgatgtagggggtggaataggaactgcagccaaggctatttcaaaggctcttccacacttgcgatgcacggttcttgatcttcctcatgtagtctcaaacatggtagggaatgcaaacatagaatttgttagtggcgacatgtttaaatatgttcctcccgctgatatagtcctgctgaagtggattatgcatgattggaatgatgaggaatgcgtgaagatactacaacgatgcagggaagcacttccggcaaaagaaaagggagggaaggtgattataatagatgtagtggtggactgcaataaaggaaagtttgaaacaactgaagcacaactttgcttcgacatattgatgatggtttgtcttactggaaaagagagaactgagaaagaatgggagaaattattcatggaatctggttttacaagttacaagataactcatggtttgggtttgaggtctattattgaagtattcccttaa

SEQ ID NO: 474 - protein, 356 aa, Argemone mexicana
MGVNDKQDQNQEVDIKDQAHLWNIIYGFADSLVLRCAVEIGIADIIKNNNGSISVSELASKLPISNVNSDNLYRILRYLVHMSILKEETSSDINGGNKLYSLQPVGTLLLRDAERSMVPMILGMTQKDFMIPWHFMKEGLGNGETAFEKGMGMTIWEYLEGHPDQSQLFNEGMAGETRLLTKSLINGCRDIFEGLNSLVDVGGGNGTTIRAIYNAFPHIKCKLYDLPHVIANSLDQPNIECIPGDMFKFVPTAQAILLKLILHDWTDEECVNILKKCKEAIPKETGKVIIVDVALEEESKHELTKTRLILDIDMLVNTGGRERTADDWENLLKRAGFRSHKIRSIAAIQSVIEAYP

SEQ ID NO: 475 - protein, 357 aa, Argemone mexicana
MEVNKIDQENQSKIWKQIYGFADSLVLKCAVQLEIAETIHNHGKPMSLSELASKLPIQPINLDRLYRVMRYLVHMKLFNKEIITINGDINNTETVIKYSLAPPAKYLIRGWEKSMVASILAINDKDFLAPWHHLKEGLTGNCDAFEKALGKSIWVFMSENPEKNKLFNEAMACDTRLVTSALVNECKNIFCDDGIKTLVDVGGGTGTAMKAISKAFPNINCTIYDLPHVIADSPEIPNITKIAGDMFKSIPSADAILMKCILHDWDDEECIKILKLCKEAVPRKGGKVIIVDVVLNMDMTHPYSKIRLTLDLDMMLNTGGKERTEEEWKKLFDAAGFATYKITQISAVQSVIEAYPY

SEQ ID NO: 476 - protein, 350 aa, Berberis thunbergii
MELNGKDESVDIKAQAHLWKIIYGFADSLVLRCAVELGIADIINDNNQPITLPDLAAKLPVSNVNFDHLYRILRYLAHMKLIKQEEKRGVTLYSLEPIGTMLVKNAKRNMVPIILGMTQKDFMTSWHFMKDGLSNDGTTAFEKGMGMTIWEYLEGHPEQSQLFNEGMAGETRLLTSSLINGSRDLFKGINSLVDVGGGNGTTIKAISDAFPHIKCTLYDLPHVVANSYDLPNVERIPGDMFQSVPSAQAILLKLILHDWSDEDCIKILKKCKEAVPKEGGKVIIVDVALDEESDHELTSTRLILDIDMLVNTGGKERSKEDWDKLIKAAGFKGFNIRHIAAVQSVIEVFP

SEQ ID NO: 477 - protein, 353 aa, Berberis thunbergii
MAANSEMVEENIIANQAKLWNSIYGFSETFVLRCAVELDIATIIHNHGKSMTLSELVSQLTVKQPVNSDSLSRLMRYLVYIDIFTDTVDVDRETRYGLAPLGKFLVKGSDHCVVEEMLVVTDKEFMAPWQCIKDGITDGSKTAFEKTFGMNIWEYMGKHSEKNTTFNEFMASDSRIMSSELVNKCKDKFQGLNSLVDVGGGTGTTARSIAKAFPSIKCTVYDLPIVLADSLVCPEITQVSGDMFKFVPSADAVLLKYILHDWGDKECIEILKRCKDAVPKDVGKVIIIDTVLDVKSDHPYTKLKLSLDLDMMINTGGKERSEEEWKTLIQAAGFKNYNITQLSALPSVIEAFP

SEQ ID NO: 478 - protein, 349 aa, Chordyalis celanthifolia
MGVNDIAEVQDVDLKAQAHLWNIIYGFADSLVLRCAVELGIADIINSNNGPVTISEIASKLPVDNVNTDNLYRVLRYLVYMGLLKESQNKCYSLEPVATLLLKDAQRSMVPIILGMTQKDFMVPWFFMKEGLGSGSSTAFEKGMGMTLWEYLEGHPDQSQLFNEGMAGETRFLTSSLINGCRDTFEGLTSLVDVGGGNGTTIKGIHDAFPHIKCSVYDLPHVIANAHPHPNIERIPGDMFKSVPSAQAILLKLILHDWTDEESVNILKRCREAVPKEGGKVIIVDVALEEGSQHELTKTRLILDIDMLVNTGGRERSVDDWDRMLKLAGFSSHKIRHIAAIQSVIEAFP

SEQ ID NO: 479 - protein, 347 aa, Chordyalis celanthifolia
MEVIKKSDQADQAKLWKFIYGFADSLVLKCAVELEIADTIHKHGEPMTLSELATKLPKQPIDTDRLYRIMRYLVQMKLFTKETSQSGEVKYGLLPPAKFVVRGWQNSMVGSLLAINDKDFIAPWHYLKDGLGGECDAFEKALGKKIWDYMSENPEKNQLFNEAMACDTRHILISALIKDCKDVFKGIKTLVDVGGGTGTAVKAISDAFPDIKCAVYDLPHVIADSPVAPNIDRIEGDMFKSIPNADAIFMKCILHDWNDDECIQILKQCKKALQDGGKVIIVDVVLNVDSKHPYTKMRLTLDLDMMLNTGGKERTEEEWKELFEAAGFSGYKIIQISALQSVIEAYP

SEQ ID NO: 480 - protein, 352 aa, Chelidonium majus
MGVNDMAVSQEVDIKAQAHLWNIIYGFADSLVLRCAVEIGIADIIKNNNGSISVSELSSKLPISNVNSDNLYRVLRYLVHMGILKEDSDINGVKLYSLQPVATLLLRDAERSMVPIILGMTQKDFMVPWHFMKEGLGDGSTAFEKGMGMTIWQYLEGHPEQSQLFNEGMAGETRLLTKSLIEGCRDTFEGLTSLVDVGGGNGTTIKGIYDAFPQIKCSVYDLPHVIASSPEHPNIERIPGDMFKSVPSAQAILLKLILHDWTDDECVNILTKCREAVPKETGRVIIVDVALEEESQHELTKTRLILDIDMLVNTGGRERTEDDWEKLLKRAGFRGHKIRHIAAIQSVIEAFP

SEQ ID NO: 481 - protein, 356 aa, Chelidonium majus
MGSSSIDVKPAETQEVSIKDQAQLWNMIYGFADSLVVRCAVELGIPDIIKNNNGPITLAQLSSKLPIPNVNSDHLYRIVRYLINLNILQQEICRNVKVYSLKPVGTLLLRDAERSMVPILLGNTQKDFLVPWHFVKEGLVNGSTTAFEKGMGMDIWKYLEGNPDQSQLFNEGMAGETSLLTKTLIEDCRDTFQNLDSLVDIGGGNGTTIKAIYEAFPHIKCTLYDLPHVVANSHDLPKIEKVPGDMFKSVPSAQAILLKLILHDWTDEECVNILKKCKEAIPKETGKVIIVDVALEEESNHELTKTRLILDIDMLVNTGGRERTADDWENLLKRAGFRSHRIRPIRAIQSVIEAFP

SEQ ID NO: 482 - protein, 369 aa, Cissampelos mucronata
MTVLEGLTISVLCTPITSFGKNTMEEAMDVHEQAHLWKLIYGFVDTLVVRSAVELGIFDIINNNLKPMTVLDLASKLPISNPCSDRLYRILRYLVHVRLLKVTDIDGLKRYSIQPVARFLLRDYDKSMAPIILGMTKKEFMSSWHHIKDGLSDDGSTAFDKAMGMSFFEYLEENPSQSKLFNEAMAGETRLLTASLINDCKDIFQGIESLVDIGGGNGTTIKAISDAFPHISCALFDLPHVVADSNDDHPNIKRVAGDMFESIPTSQAILLKLILHDWSDEDCVRILKRCREAVPKEGGKVIIVDVALEEESKHELNNPRLVLDIDMLVNTGGKERSREDWEKLTKLAGFGGYKIRHIAAIQSVIEITP

SEQ ID NO: 483 - protein, 343 aa, Cissampelos Mucrronata
MEEEMKAQAQVWRYVYGFADSLTLKCAIQLDIPDILHRHGRPLSLSALASRLPLPTVNPDRLHRLMRYLVHMGLFDLVPSPDEPAYASNPSSALLVKGQPKSLASFALLQYYEMDAWHHLSAAVEGSVTPWERCHGVDYREYFAKDPVANQLLSDAMTSHTSMVTEALVEGCRKAGALDGVRSFVDVGGSTGVAARAVAKAFPGIKCSVFDLPHVIATAPECPEVERIEGDMFASVPETDVVFMKSVLHDWGDEDCVKILKKCKEAIAGKEGGKVVILDIVLDVESSYEFKGARLGMEMDMLVTVGGKERSEAEWQKLIKDAGFSRYKITPIVAIESIIEVFP

SEQ ID NO: 484 - protein, 342 aa, Cocculus trilobus
DQAAQAQLWKFIYGFAESLVIKSAIQLDIPDIIDNHGKPITISELASRIPSQGPVDHDRLYRIMRYLVHMKLFTKESIDGEDQYGLAPPAKYLVKGWEKSIVPSILCITDKEFMSPWYHLKEGLSNGDNQTAFEKALGVNIWDYMSKNPKKNNIFNEAMACDTRLLMSALVSECKDMFQGIKSLVDIGGGTGTAVRYIAKAFPHINCTVYDLPHVAADSPTYPEVNRIEGDMFKYIPSADAILMKCILHDWADEECIQILKKCKEALPSTGGKVILVDIVLNAYSEHPYSKMRMVMDLDMMLNCGGKERTEEEWKKLIYAAGFSRYNIRQVNAIQSVIEVYP

SEQ ID NO: 485 - protein, 343 aa, Cocculus trilobus
MEEEMKAQAQVWRYVYGFAESLTLKCAIQLNIPDILHQHGRPMTLSELASHLPLPTVNQDRLFRVMRYLVHMGLFDLVDSPDSKKYSLNSASKLLIKGQDKSLASFALLQYYEMDAWHHLSAAVEGGATPWEKCHGVDYREYFSKDSVANQLLSDAMTSHTSMVTEALVEGCKKANVLDGVRSFVDVGGSTGVAARAVAKAFPNVKCSVFDLPHVIATAPECPEVTRIEGDMFVSIPETDVVFMKSVLHDWGDEDCVKILKKCKEAIAGKDGGKVVILDIVLDAESSYEFKGARLGMEMDMLVTVGGKERGEEEWQKLFKAAGYSRYKITPIVAIESVIEVFP

SEQ ID NO: 486 - protein, 353 aa, Eschscholzia californica
MGLEFNEEVDIKAQAHLWNIIYGFADSLVLRSAVELGIADIIKNNNGSITVSELASKLPISNVNSDNLYRVLRYLVHMGILKETKSTINGGEIKKLYSLEPVGSLLVKDAERNMVPIVLGMTQQDFMIPWHYIKEGLGEGSTAFEKGMGMTLWEYLEGHPEQGHLFNVGMEGETRLLTKTLIESCKDTFEGLSSLVDVGGGNGTTIKAISEAFPHIKCSLYDLPHVVADSHDLPNIEKIPGDIFKFIPNAQAILLKLILHDWSDEDSVKILKKCREAVPQDTGRVIIVDVALEEESEHPLTKTRLVLDVDMLVNTGGRERSEDDWAKLLKLAGFRTHKIRHIAAVQSVIEAFP

SEQ ID NO: 487 - protein, 348 aa, Eschscholzia californica
MEGADKIDQATQAKIWKHIYGFAESLVIKSAVELEIADTIHNHGKPMTLSELASKLPVQPVDLDRLYRVMRYLVHMKLFKKQEDEEESIKYSLLPPAKFLIKGWEKSMVSAILLINDKDFMSPWHHLKEGLVNNSNAFDKALGKSIWDYMSANPDKNKVFNEGMACDSRLVSSALVNECGNIFQGIQTLVDVGGGTGTAVKAVSKAFPHIKCSIYDLPHVISDSPDIPNIVKIEGDMFKSIPSADAILMKCILHDWNDEECIEILKKCKEAVPKEGGKVIIVDIVLDMESKHPYSKVRLTLDLDMMLNTEGKERTEEEWKKLIDGAGFASYKITQISALQSVIEAFPY

SEQ ID NO: 488 - protein, 353 aa, Glaucium flavum
MGVSDNKPESQEVDIKAQAHLWNIIYGFADSLVLRCAVEIGIADIIKSNNGSISVTELASKLPITNVNSDNLYRVLRYLVHMGILKEVSDSNEVKLYSLQPVATLLLRDAERSMVPIILGMTQKDFMIPWHFMKEGLGNDTTAFEKGMGMTIWQYLEGHPEQSNLFNEGMAGETRLLTKSLIDGCRDTFEGLTSLCDVGGGNGTTIKGIYDAFPQIKCSVYDLPHVIASSPEHPNIERIPGDMFKSVPSAQAILLKLILHDWTDEECVNILIKCREAVPKDTGKVIIVDVALEEESQHELTKTRLILDIDMLVNTGGRERSEDDWEKLLKRAGFRGHKIRHIAAIQSVIEAFP

SEQ ID NO: 489 - protein, 348 aa, Glaucium flavum
MEATKSDQANQANIWKLIYGFAESLVLKCAIQLEIADTIHNHGEPMSLSELASKLPVQPVNSDRLYRVMRYLVHMKLFNKEKTSINGEFKYSLAPPAKFLIKGWEKSMVASILAINDKDFLAPWHHLKDGLSGDCDAFEKALGKSIWVYMSENPEKNQLFNEAMACDTRLVTSALVNDCQSVFKGINTLVDVGGGTGTAVKAISKAFPHIKCSIYDLPHVIADSPEIPNVVKIEGDMFKAIPSADAILMKCILHDWNDDECIQILKKCKEAVPQEGGKVIIVDVVLNMDLTHPYSKIRLTLDLDMMLNTGGKERTVEEWKKLIDAAGFASFKITEISAVQSVIEAFPY

SEQ ID NO: 490 - protein, 353 aa, Hydrastis canadensis
MDANGNKDHESSDIKSQAHLWKIIYGFADSLVLRCAVELEIFDIIDNNNQPITVSELASKLPIADVNSDNLYRILRYLVQMKILKLNKVVDDGVNKYSLQPIAALLLRNSKRNMVPIILGMTQKDFMTSWHSMKDGLSNNGTAFEKGMGMTIWEYLEGHPEQSQLFNEGMAGETRLLTSSLISGSKDMFQSIHSLVDVGGGNGTTIKAISDAFPHIKCTLFDLPHVIANAYDHPNIERIPGDMFKSMPSAQAILLKLILHDWSDEDCIKILKSCKEAVPKDGGKVIIVDVALDEESDHELTSTRLILDIDMLVNTGGRERSKEDWEKLVKCAGFKGCKIRHIAAVQSVIEVFP

SEQ ID NO: 491 - protein, 356 aa, Hydrastis canadensis
MEIKMEGVEGHELLEAQAHIWNHTFNFITSMTLKCAVQLGIPDIIYNHGQPITLSELVKALSIHQMKSDYLYRLMRILVHSEFFAIQKIHEDQEGYVLTPSSKYLLKNQLTNLSPYILMVLDPVLVTPCHFMSAWFQGNESTPFEVAHGMSFWEYCGQHPDIRKYFNKAMASDAELVMTVASKECKTMFEGFKSLVDVGGGTGTMAKAISKSFPHLKCTVFDLPYIVSNLQGSENIEFVGGDMFESVPPGDIFLLKLILHDWKDEECVNILKRCREAISLENKGGKVIIIDMIVDDNRGKYESTEAQLCFDMLLMVLVTGKERTESEWEKLFLEAGFTSYKITPALGLRSFIEVFL

SEQ ID NO: 492 - protein, 351 aa, Jeffersonia diphylla
MEVNGKTNEAVDIKAQAHLWKIIYGFADSLVLRCAVELGIADIIDNNNQPITLSDLASKLPLPSVNIDYLYRIMRYLVHMKLFKVEENINGVKQYSLQPTGTLLLRTAERNMVPMVLGMTQKDFVTPWHFMKDGLSDDGTAFEKGMGMTIWEYLEGHPDQSQLFNEGMAGETRLLTSSLISGCGDLFKGITSLVDVGGGNGTTLKGISDAFPHIKCTLFDLPYVIANSYDHPNIERIAGDMFQSVPSAQAILLKLILHDWSDEDCIKILKKCKEAVPKEGGKVIIVDVALDEESDHELTSTRLILDIDMLVNTGGKERTKEDWNKLVKAAGFRGFNIKHIAAVQSVIEVFP

SEQ ID NO: 493 - protein, 351 aa, Jeffersonia diphylla
MEAKTGFEISSQANLWNFIYGFSNSLVLRCAVELDIANIIHNHGMPITLSELELLLPVQPVNTASLYRVMRYLAHIKIFTKTLDVDGETRYGLTPSAKFLVKGWDQCTVGAILGITDKDFMAPWHYIKDGLTGDSKKTAFEKALGMDIWKYMGDHPEKNKLFNAAMACDSRLAMSALINECKDKFQEITSLVDVGGGTGTAARNIAQAFPHIKCTVYDLPHVIADSPVYPELNSVAGDMFKCVPNADAIFMKCILHDWDDKECIEILKQCKEAVPKQGGKVIIVDIVLNMKSDHPYTKLRLTLDLDMMLNTGGGKERTEEEWKKLFQAAGFRGYNITQISALQSVIEAFPY

SEQ ID NO: 494 - protein, 350 aa, Mahonia aquifolium
MELNGKDESVDIKAQAHLWKIIYGSADSLVLRCAVELGIADIINDNNQPITLPDLASKLPLSNVNIDHLYRILRFLAHMKLIKQEEKQGVTLYSLEPIGTLLVRNAKRNMVPIILGMTQKDFMTSWHFMKDGLSNDGTTAFEKGMGMTIWEYLERHPEQSQLFNEGMAGETRLLTSSLINGCRDMFKGINSLVDVGGGNGTTIKAISDAFPHIKCTLYDLSHVVANSYDLPNVERIPGDMFQSVPSAQAILLKLILHDWSDEDCIKILKKCKEAVPKEGGKVIIVDVALDETSDHELTGTRLILDIDMLVNTGGKERSKEDWDKLVKAAGFKGFNIRHIAAVQSVIEVFP

SEQ ID NO: 495 - protein, 349 aa, Mahonia aquifolium
MGEENIANQAKLWNIIYGFADSLVLRCAVELDIANIIHNHGKSMTLSELASVLPVKQPVNSDSLYRVMRYLAHLRVFTKTLDADGETRYGLAPPANFLVRGNDNCMVGSLMGLTDKEFMAPWHYIKDGLSGDDGKTAFEKALGMDIWEYMGENPEKNKLFNEAMACDTRLVLSALINECKDKFQGLNSLVDVGGGTGTAARNLAKAFPHLKCTAYDLPHVIADSPVYPEITQVPGDMFKVIPYADAILMKCILHDWGDKECIQIVKKCKEALPKEGGKVIIVDIVLDVKSEHPYTKLRLTLDVDMMLNTGGGKERTEEEWKKLIQAAGFKSYNITQISALQSVIEAFPY

SEQ ID NO: 496 - protein, 355 aa, Menispermum canadense
MILDNHDKAEEALVVDVHDQAHLWKLIYGFVDTLVVRSAVELGIMDIIYNNKKPISLFDLASKLPVSNTCPDRLYRILRYLVHVRLLRVAEVDGLKKYLLAPAAKLLLRNTEKSMVPIILGMTQKDFVVPWHHINDGLGSEGATAFDKSMGMSFFEYLEENPSQSKLFNEAMAGETRLLTASLINGCKDLFQGIESLVDVGGGNGTTIKAISDSFPHIKCTLFDLPYVVADSHDDPNIKRVHGDMFKSIPSSQAILLKLILHDWSDEDCVKILKRCKEAVPKEGGKVIIVDVALDEESQHELSSTRLILDIDMLVNTGGKERSKEDWEKLIKCAGFGGYKIRHIAAIQSVIEVFP

SEQ ID NO: 497 - protein, 350 aa, Menispermum canadense
MDTTINGSLLEADHNLQVKAQAHVWNTIYRFSDSLILRAVIDLGILDIINSNNNSISLSELASKLPLHHVHHDHISRILRHLTHMKILRVVTADDDGDDNMITKYSLEPLVAALLLKSSEKSLAYNVLGMIQKEFVLPWHYIKDCLVGCDESTIFTTPFEKAMGVTFWEYLEGHLEDSKNFNESMASETRLLTASLIDGCRDVFESVGSIVDVGGGNGTTLKAISNEFPHIKCTLFDLPYVVANACDCPGIECVSGDMFKAIPSAQAILLKLILHDWGDEDCVKILKRCKEAVPSDVGKVIIVDVALEEDFEDELTGARLALDMDMLVTTGGKERTKEDWEKLVKRAGFR

SEQ ID NO: 498 - protein, 351 aa, Nandina domestica
MAMNGKANEFEDIKAQAHLWKIIYGFADSLVLRCAVELGIADIISNNNKPISLSCLASKLPLPHVNLDHLYRIMRYLVHMKLLKLVVNENGEKLYALEPISTLLLKDAKRNMVPMVLGMTQKDFVTPWHYMKDGLSDDGTAFEKGMGMTIWEYLQGHPDQSQLFNEGMAGETRLLTSSLISGCGDLFKSLTSLVDVGGGNGTTIKAISDAFPHIKCTLFDLPYVIANSYDHPDIERISGDMFKSVPSAQAILLKLILHDWSDEDCIRILKQCKEAVPKEGGKVIIVDVALDEESDHELTSTRLILDIDMLVNTGGKERTKEDWDKLVKAAGFRGFNIRHIAAIQSVIEVFP

SEQ ID NO: 499 - protein, 350 aa, Nandina domestica
MEVMKEQDVSAQAKMWNYIYGFSETLVLRCAVELDIANIIHNHGKPITLPELASKLPRQPVNSDSLYRVMRHLAHMKLFTKTKVDGDTKYELAPSAKFLVKGADKCMVGALLAITDKDFMAPWHYIKDGLTGDSKSTAFDKALGMDIWTYMGKHPEKNQLFNEAMACDTRLAMSALVNECKDKFNGIKSLVDVGGGTGTAVRNIAKAFPHIKCTVYDLPHVIADSLAYPEINRIAGDMFKSVPKADAILMKCILHDWADEECIEILKKCKEAVPEDGGKVIIIDIVLNVESDHPYTKMRLTLDLDMMLNTGGGKERTEEEWKKLIQAAGFRSYNITQISAVQSVIEAFPY

SEQ ID NO: 500 - protein, 349 aa, Nigella sativa
MAFYANDEALDVEAQAHVWKIIYGFADSLVLRCAVELEIFDIIGNNNSIQLSELASKLPVANVVPDHLYRLLRYLIKMELLRLETSNKGVKEYTLQPTARLLLRNEKRSMVPMILGNTQKDFMTPWHSMKDGLGHSGTAFEKSKGMTIWEYLETHPDQSQLFNKGMAAQTRLLTSSLISVNKDIFQSINSLVDVGGGNGTTIKAISDAFPHIQCTLFDLPHVIANSYDHPNIQRIGGDMFKSVPSAQAILLKLILHDWSDEDSIKILKQCKAALTENGGKVIIVDVALDEDSDHELSSTRLILDIDMLVNTGGRERTKEDWERLVKSAGFSGCNIRHIAAIQSVIEVFP

SEQ ID NO: 501 - protein, 354 aa, Nigella sativa
MEEMINGDESKEILKAQAHIWKYTFNYITSMSLKCAVQLGIPDIIANHGKPLNLSQLVNELSIPHLKSPHLYRLMRILVHSGFFAIEEGEGYVLTPSSKLLLSKNQNTNLSPFVLMMMDPVLVTPFHFLTDWFQGNQTTAFKVAHGMEMWDYYGQHSDVNKSFDDSLAGDSGLVMGVVLKHWKEMFQGFGSLVDVGGSTGSVAKAISEVFPLMKCTVLDLPHVVSDMKGSKNLEFISGDMFEYIPPADIILLKWIMHDWSDEKCIKILKNCKEAISEHKGGKVVVIDIILDEDQGLRRNDSVETQLCLDILMMVSHAAKERTEAEWKKLFLDAGFSSFKVTRGLGLRSIIEVFP

SEQ ID NO: 502 - protein, 355 aa, Papaver bracteatum
MGSLAKPAETQEVSIKDQAQLWNIIYGFADSLVLRCAVEIGIADIIKNNDGAITLAQLASKLPVPNVSSDYLYRMVRYLVHLNILAQETCNGGVEKVYSLKPVGTLLLRDAERSMVPMILGMTEKDFMVSWHFINSGLGAGGGVVFAGGMGMDIWKYLESNPDQSQLFNEGMAGETRLLTKTLIEDCRDTFQGLDSLVDIGGGNGTTIKAIHEAFPHIKCSLYDLPHVVANSHDLPNIEKVPGDMFKSVPSAQAILLKLILHDWTDEECVNILKKCKEAIPKETGKVIIVDVALEEESNHELTKTRLILDIDMLVNTGGRERTADDWENLLKRAGFRSHRIRPIRAIQSVIEAFP

SEQ ID NO: 503 - protein, 357 aa, Papaver bracteatum
MDTLYANPAETQEEIGIKDQAQIWNLIYGFADSLVLRCTVEIGLPDIIKNNNGPITLAQLSSKLPIPDVNSDHLHRILRYLVHLNILRQETCNGGADKVYSLKPAGTLLLSDAEGSMIPILLGMTEKDFMLPWHFMKEGLGNGSTTAFEKGVGMDVWEYLEANPDQSRLFDEGMAATTRLLSKTLVEDCRGTFEGLDSLVDVGGGNGTTIMAISEAFPHIKCTLFDLPRVIASSHNHPNIERVPGDMFKSVPIAQAILLKMVLHDWDDEACVKILKKCKEAIPKETGKVIIVDAALEEESEHELTKTRLILDIDMLVNSGGRERTADDWEILLKRAGFRSHRIRPIRAIQSVIEAFP

SEQ ID NO: 504 - protein, 352 aa, Sanguinaria canadensis
MGINDKPESQEVDIKAQAHLWSIIYGFADSLVLRCAVEIGIADIIKNNNGSISVTELSSKLPISNVNSDNLYRVLRYLVHMGILKEDSDNNGVKLYSLQPVATLLLRDAERSMVPIILGMTQKDFMVPWHFMKEGLGNGGTAFEKGMGMTIWQYLEGHPEQSQLFNEGMAGETRLLTKSLIEGCKDTFEGLTSLVDVGGGNGTTIKAIYDAFPHIKCSVYDLPHVIASSHDLPNIERIPGDMFKSIPSAQAILLKLILHDWTDEECVNILKKCKEAVPKETGKVIIVDVALEEESQHELTKTRLILDIDMLVNTGGRERTEDDWEKLLKRAGFRGHKIRHIAAIQSVIEAFP

SEQ ID NO: 505 - protein, 348 aa, Sanguinaria canadensis
MEANKSDQATQAKIWKLIYGFAESLVLKCAVQLEIADTIHNHGKPMTLSELASELPIQPVNSDRLYRVMRYLVHMKLFNKEKSTINGEFKYSLAPPAKFLIKGWEKSMVASILAINDKDFLAPWHHLKDGLVGDCDVFEKALGKSIWVYMSENPEKNQLFNEAMACDTRLVTSALVNNCGNVFHGIKTLVDVGGGTGTAVKAISKAFPHIKCTIYDLPHVIADSPEIPNIVKIEGDMFKSVPSADAILMKCILHDWNDEECIQILKKCKEAVPREGGKVIIVDVVLNMDSTHPYSKIRFTLDLDMMLNTGGKERTLEEWKKLIDAAGFASFKITQMSTVQSVIEAYPY

SEQ ID NO: 506 - protein, 352 aa, Stylophorum diphyllum
MGVNDMAVSQEVDIKAQAHLWNIIYGFADSLVLRCAVEIGIADIIKNNNGSISVSELSSKLPISNVNSDNLYRVLRYLVHMGILKEDSDINGVKLFSLQPVATLLLRDAERSMVPIILGMTQKDFMVPWHFMKEGLGDGSTAFEKGMGMTIWQYLEGHPEQSQLFNEGMAGETRLLTKSLIEGCRDTFEGLTSLVDVGGGNGTTIKGIYDAFPQIKCSVYDLPHVIASSPEHPNIERIPGDMFKSVPSAQAILLKLILHDWTDEECVNILTKCREAVPKETGRVIIVDVALEEESQHELTKTRLILDIDMLVNTGGRERTEDDWEKLIKRAGFRGHKIRHIAAIQSVIEAFP

SEQ ID NO: 507 - protein, 358 aa, Stylophorum diphyllum
MALQSDEQVLHSQTHIWNHIFSFINSMSLKCAIQLEIPDIIERHGAPMLLSELVDALSINKERAPFVYRLMRLLVHSGFFVKQKVSEESEEGYLLAPASRFLLKEEPLSIRPFLLAMLDPIVMDPWQHLSKWFQNNDINPFYTAHGKNPWELLRHKPELIQLTNEGWASDSRLVTSVILKQSGTGSAFFEGLNSIVDVGGGTGTVAKAIADAFPKLSCISFDLPQVVNGLVGGKNLSFIGGDMFQEIPKADAVLLKWILHGWNDEECLKILKRCKEAIPSKENGGKVIIIDMVVKDHQGPGDDEFIKAQLFFDMLMMASQTGRERNEKDWAKLFLDAGFSDYKITHNLGSRSFIEVYP

SEQ ID NO: 508 - protein, 351 aa, Tinospora cordifolia
MEAATLKQDQQAQAKIWKFIYGFSESLVLKCAIDLEIPDIIHNHGTPISLSQLSSQIAPAKQPVDSDRLYRIMRYLVHMGLFTEESISGELRYGLAPPAKYLVKGWEKSVVPSLLCINDKDMMSPWHYLKDSTVAGDNRTAFEMALGVNIWDYMGKNPKKNSVFNEAMACDTRLLMSAMVNECKDMFQGIKSLVDVGGGTGTAVRNIAKAFPHIKCTVFDLPHVAADSPVYPEVNRIEGDMFKGIPSADAILMKCILHDWDDKECIEILKKCKEAVPEDGGKVIVVDIVLNAHSDHPYTKMRMVMDLDMMLNCGGKERTEEEWKKLIYAAGFSRYNIRQINAIQSVIEIYP

SEQ ID NO: 509 - protein, 341 aa, Tinospora cordifolia
MEEERNAQALVWRYAYGFADSLTLKCAIQLGIADILHQHGQPMTLSELASSLPLPTVNQDRLHRIMRYLVHMGLFDLVDSDTKYALNPASTLLVRTQPKNLASFALLQYYEMDAWHHLSAAVEGHVTPWEKCHGTDYREYFAKDEVANQLLSDAMTSHTSMVTEALVEGCKKGKVLDGVRSFVDVGGSTGVAARAVAKAFPWVKCAVFDLPHVIATAPECPGVERIAGDMFASVPETDVVFMKSVLHDWGDEDCVKILKKCKEAIGGKKEGKVVILDIVLDAKSSNEFEGARLGMDMDMLVTVGGKERSEEEWKKLFKDSGYSHYKITPIVAIESIIELFP

SEQ ID NO: 510 - protein, 348 aa, Thalictrum flavum
MAAFQGKDESVDINAQAHVWKIIYGFADSLVLRCAVELGIFDIIDNNNQPITLADLASKLPISNVNLDNLFRILRYLVKMEILSYAGVNKYALEPIAKLVLRNEKRSMVPMVLGMTQKDFMTPWHSMKDGLTDNGVTAFEKAMGMTIWEYLEGHPDQSQLFNEGMAGETRLLTSSLISGSKDLFQSIDAVVDVGGGNGTTIKAISDAFPHIKCTLFDLPHVIANSYDHPNIERIGGDMFKGMPSAQAILLKLILHDWNDEDSIKILKQCRKAVPKDGGRVIIVDVALDEDSDHELSSTRLILDIDMLVNTGGKERTKEDWEKLVKCAGFSGCKIRHIAAIQSVIEIFP

SEQ ID NO: 511 - protein, 341 aa, Thalictrum flavum
MEDLSSQAKLWNYIYGFADSLVLKCAVQLDLANLIHDHGTPMTLSELSSRLPSQPVNQDALYRVMRYLVHIKLFTKSSIDGELRYGLAPPAKFLVKGWDNCMIGSILLMVDTDFMALYHYIKDEILNDGSSITITAFEKALGTNIWEYLAEHPEKNQLFNEGMANESRLYCSSTFEGLTTLVDVGGGTGTTVKYIAKAFPNIKYTVYDLPHVIADAPGDTEINFVQGDMFKYIPNADAILMKGVLHDWDDNECIEILKRCKHAVPRDGGKVIIIDVVLNVKSEHPYTKMRLTLDLDMMLNNKGKERTEEDWKKLIYDDAGYKGYKITQISALQSVIEAYPY

SEQ ID NO: 512 - protein, 350 aa, Xanthoriza simplicissima
MAFHGKDDALDIKAQAHVWKIIYGFADSLVLRCAVELGIVDIIDNNNQPIALADLASKLPVSNVNCDNLYRILRYLVKMEILRLENSDDGEKKYALEPIATLLSRNAKRSMVPMILGMTQKDFMTPWHSMKDGLSDDGTAFEKAMGMTIWEYLEGHPDQSQLFNEGMAGETRLLTSSLISGSRDMFQGIDSLVDVGGGNGTTIKAISDAFPHIKCTLFDLPHVIANSYDHPNIERIGGDMFKSVPSAQAILLKLILHDWNDEDSIKILKQCRNAVPKDGGKVIIVDVALDEESDHELSSTRLILDIDMLVNTGGKERTKEVWEKIVKSAGFSGCKIRHIAAIQSVIEVFP

SEQ ID NO: 513 - protein, 354 aa, Xanthoriza simplicissima
EIIKGDGTKEVLEAQAHIWNYTFNYITSMSLRCAVQLGIPDIIDNHDKPVTLSELVKALSFPQVKSAHVYRLMRVLVHSGFFTVGKIHEQEEEYMLTPSSKLLMKNHVTNLAPFLLMITDPVIANSCHFMTSLFQGSEVLPIEVAHGMSLWNYCNQHPEFNQLFNDAMASDTNFVLSVVVKEYKAIFEGFRSLVDVGGGIGTAAKAISKALPHLRCTVLDLPHVVSNMVGNANIEFVSGDMFKYVPPADIVLLKWIMHDWNDEECVKILQRCREALPAKEKGGKVIIIDVVVDCNKGKFETTEAQLCFDILMMVCLTGKERTEKEWEKLFMESGFTSYKITHGLGLRSIIEVFP

SEQ ID NO: 514 - DNA, 1380 bp, Argemone mexicana
atgagtgatatcatgaaggttgaagtagtatcaagagagataatcaaacccttatctccaacacccaatcaccttaaaaccttcaatttatcatttcttgatcaactttctcctccaatttatgtacccataattcttttctacccaattgactgtaaaaatgattgtaaatcaacaatcgaatcgattcgtggtaacctaaagaaaaccctagctcatactctaactaaatactatccattagctggaagaatcaaagatggtagctttgttgaatgtaatgatgatggtgtagactatgttgaagctaatgtatatgatattaatggtggaatctctgaaattatacaaaacccagatggagatatactgaaaaaattgcttccatttgatccttatggtgttgaaggatacaatactaaagtacttctctctatcagaatcaatgttcttgaagaaaactgtggtggaattgtgattggtatttgtatttcccataaaattggagatggatcttcattaactactttcattaatgattgggctgctgcagctcgaaaaaaccctagtgaacagatcaaaggtccccaatttgatttgccatctctattcccattaagagatttaaagggttatattcctccctcagctggtgcagaaatggtagaagaaattgtgacaaagaaatttgtgtttgaaggttctaagataactgaactcaagaaaaaaggtatcgttaatggcggaaacaatgatgacgatgacgttaagaagtacccgagtcgagttgaagcagtatcggctttcatttggagacgtgtgatcggtttagatcaagctaagaaacaaggtggtgattctaataatgaagctcctgtaacagtatatggatctttacatgcagtaaacatgagatcaaggatgaatccaccattaccatcaaattctttcggaaatatgtatactactacaatggcgttttccattattaataatcatgctgatgaggaagagaaattagggcattatcaattgccaaatttagtcgaaaaggttaaagaatcgataaagaaaatcgatagtgaatatgttaagaaagttcaaactactgatgaactattgaattctatgaaacacttagctacgggtcatcaaatggtgatgctaagttttagtagttggtgtaggtttccgatatatgaagccgattttggttggggaaaaccaatttgggtaacgacatctacgtttcctttcaagaatgtagttgttttcatggatactaaatcaggggacggaatagaagcgtgggtgaatatgactaaagatgatatggctgcgttcgagcgtgatcaagaactccttcaatatgtttcttaa

SEQ ID NO: 515 - protein, 354 aa, Papaver somniferum
MGSSIDAETHEVDIKDQAQLWNIIYGYADSLVLRCTVEIGIADIIKNNNGSITLSELVSKLPLSNVNSDNLYRLLRYLVHLNILGQQTCAAGVDRVYSLKPVGTLLLKDSERSMAPVILGLSQKDFLFVWNFVKEGLGTGSTTAFEKAMGMDMWKYLEVNPNQSQLFDEGQAGETRLLTKTLLVDCRDTFQGMDSLVDVGGGNGTTIKAIHEAFPHIKCTLYDLPHVIANSDDHPNILKVPGDMFMSVPSAQVLLLKCVLHDWTDEHCVNILKKCKEAIPKETGKVIIVDVALEEESEHELTKARLILDIDMLVNTGGRERTAEDWENLLKRAGFRSHKIRPIRAIQSVIEAFP

SEQ ID NO: 516 - DNA, 1065 bp, Papaver somniferum
atgggtagtagtatagatgctgaaacacatgaagttgacatcaaagatcaagctcaattatggaatataatctatggttatgctgattctcttgttcttcgttgcacagtagagattggaatcgcagatattatcaaaaacaataatgggtcaatcacactttcagagcttgtatcgaaactaccactttcaaatgtgaattctgataatttgtacagacttctaagatacttagtacacctgaatatcttaggacaacaaacttgtgctgctggagttgatagggtttactcacttaaaccagttggcacattattattaaaagattctgaaagaagcatggcaccagtaatattaggcctgtcacaaaaagatttcttgtttgtatggaatttcgtgaaagaaggattaggcactggaagtacaacagcatttgagaaagcaatgggaatggatatgtggaagtatttagaagttaatcctaatcaaagtcagttgtttgatgaagggcaagctggagaaacaagacttttaactaaaactctacttgtagattgtagagatacttttcaaggtatggattcgcttgttgatgttggtggaggaaacggtacgacaattaaggcaatccatgaagcttttcctcatattaaatgtacgctttatgatcttcctcatgttattgctaactctgatgatcaccctaacatcctaaaagttcccggtgatatgttcatgtctgttccaagtgctcaagttctcttactcaagtgcgtcttgcatgactggactgatgaacactgcgtcaacattctaaagaaatgcaaagaagcaatcccgaaagagacagggaaagtgatcatagtggatgtagcacttgaagaagaatctgaacatgaacttacaaaggcaagattgattcttgatattgatatgttggtgaatacaggtggtagagagagaactgcagaggattgggaaaatttgctcaaacgtgcaggctttcggtctcataagatcagaccgattcgcgctattcagtctgtcattgaagctttcccatag

SEQ ID NO: 517 - protein, 357 aa, Papaver somniferum
MGSLDAKPAAATQEVSIKDQAQLWNIIYGFADSLVLRCAVEIGIADIIKNNDGAITLAQLAAKLPITNVSSDYLYRMVRYLVHLNIIEQETCNGGVEKVYSLKPVGTLLLRDAERSMVPMILGMTQKDFMVSWHFMKEGLGNGSTTAFEKGMGMDIWKYLEGNPDQSQLFNEGMAGETRLLTKTLIEDCRDTFQGLDSLVDIGGGNGTTIKAIYEAFPHIKCTLYDLPHVVANSHDLPNIEKVPGDMFKSVPSAQAILLKLILHDWTDEECVNILKKCKEAIPKETGKVIIVDVALEEESNHELTKTRLILDIDMLVNTGGRERTADDWENLLKRAGFRSHKIRPIRAIQSVIEAFP

SEQ ID NO: 518 - DNA, 1074 bp, Papaver somniferum
atgggtagtttagatgcaaaaccagctgctgcaacacaagaagtttccatcaaagatcaagctcaactatggaatataatctatggttttgctgattctcttgttcttcgctgcgcggtagagattggaatcgcggatattatcaaaaacaatgatggggcaatcacacttgcacaacttgcggcgaaactcccaattacaaatgtcagttctgattacttgtacagaatggtaagatacttggtacacctgaatatcatagaacaagaaacttgtaacggcggagttgagaaggtttactcgcttaaaccggtcggtactctacttttaagagatgcagaaagaagtatggtgccgatgatactaggcatgactcaaaaagatttcatggtttcatggcatttcatgaaagaaggtttaggaaatggaagtacgactgcatttgagaaaggtatggggatggatatatggaagtatttagaaggtaatcctgatcagagccagttgtttaatgaaggaatggctggagaaacaagacttttaactaaaacgctgatcgaagattgtagagatacttttcaaggtttggattctcttgttgatattggtggaggaaatggtacgacaatcaaggcaatctatgaagcttttcctcatatcaaatgtacactttatgatcttcctcatgttgttgccaactctcatgatctccctaacatcgaaaaagttcccggtgatatgttcaagtctgttcccagtgctcaggctatcttactcaagttgattttgcatgactggactgatgaagagtgtgtcaacatcctaaagaagtgcaaagaagcaataccgaaagagacagggaaagtgattatagtggatgtagcacttgaagaagaatccaaccatgaacttacaaagacaagattgattcttgatattgacatgttggtaaatactggtggtagagagagaactgcagatgattgggaaaatttgctcaaacgtgcaggctttcggtctcataagatcagacccattcgcgctattcagtcagtcattgaagccttcccttag

SEQ ID NO: 519 - protein, 346 aa, Papaver somniferum
METVSKIDQQNQAKIWKQIYGFAESLVLKCAVQLEIAETLHNNVKPMSLSELASKLPVAQPVNEDRLFRIMRYLVHMELFKIDATTQKYSLAPPAKYLLRGWEKSMVDSILCINDKDFLAPWHHLGDGLTGNCDAFEKALGKSIWVYMSVNPEKNQLFNAAMACDTRLVTSALANECKSIFSDGISTLVDVGGGTGTAVKAISKAFPDIKCTIYDLPHVIADSPEIPNITKISGDMFKSIPSADAIFMKCILHDWNDDECIQILKRCKEALPKGGKVIIVDVVIDMDSTHPYAKIRLTLDLDMMLNTGGKERTKEEWKTLFDAAGFASHKVTQISAVQSVIEAYPY

SEQ ID NO: 520 - DNA, 1041 bp, Papaver somniferum
  misc_feature (672)..(672): n is a, c, g, or t
atggaaacagtaagcaagattgatcaacaaaaccaagcaaaaatctggaaacaaatttacggtttcgcagaatcactagttctgaaatgtgcagtccaactagagattgctgaaacacttcacaacaatgtcaaacccatgtctttatccgaattggcatcgaaacttcccgttgctcaacccgttaacgaagaccgtctgttccgaattatgcgttacttggttcacatggagctcttcaaaatagatgctaccacgcagaaatactcattagctccaccagctaagtatttgttgagaggctgggagaaatcaatggttgattcaattttatgcataaatgataaggatttcttagctccatggcaccatttaggcgacggtttgaccggtaactgtgacgcttttgagaaagcgttggggaagagtatttgggtgtatatgagtgtaaatcctgaaaagaatcaattgtttaatgcagcaatggcttgtgatactagattggttacttctgcattggctaatgagtgcaaaagtattttcagtgatggaatcagtacactggttgatgtcggcggtggtacgggtactgcagtgaaagccatatctaaagcttttccggatattaagtgcactatctatgatcttcctcatgtcatagctgattctccngaaatccccaatatcactaaaatttctggagatatgttcaagtctattcctagtgctgatgccatcttcatgaagtgcatacttcacgactggaacgatgacgaatgcattcaaatcttgaagagatgcaaagaagcattaccaaaaggtggcaaagttattatcgtggatgtcgtgatagacatggattcgactcatccatatgcaaaaattagactcacactggatttggatatgatgcttaacactggtggaaaagagagaaccaaagaagaatggaagacactttttgatgccgctggttttgctagccacaaagtcactcagatatctgctgtccaatctgtaattgaggcttacccttattaa

SEQ ID NO: 521 - protein, 357 aa, Papaver somniferum
MEVVSQIDQENQAIIWKQIYGFSESLLLKCAVQCEIAETIHNHGTPMSILELAAKLPIDQPVNIDRLYRVMRYLVHQKLFNKEVISTLNGGTVQVTEKYWLAPPAKYLIRGSQQSMVPSVLGIIDEDMFAPWHILKDSLTGECNIFETALGKSISVYMSENPEMNQISNGAMAFDSGLVTSHLVNECKSVFGDEIKTLVDVGGGTGTALRAISKAFPNIKCTLFDLPHVIADSPEIPTITKVSGDMFKSIPSADAIFMKNILHDWNDDECIQILKRCKDVVSAGGKLIMVEMVLDEDSFHPYSKLRLTSDIDMMVNNGGKERTEKEWEKLFDAAGFASCKFTQMSVGFAAQSIIEVY

SEQ ID NO: 522 - DNA, 1074 bp, Papaver somniferum
atggaagtagttagccagattgatcaagaaaatcaagcaataatctggaaacaaatttatggtttttcggaatcattacttctcaaatgtgcagttcaatgtgagattgctgaaactattcataaccatggaacaccaatgtctatattggaattagctgctaagcttccaattgatcaaccggttaatatcgaccgtttgtaccgagttatgcgttacttagttcaccagaaacttttcaacaaggaagttatctccacgcttaatggtggaaccgttcaagtaacagagaagtactggttagctccaccggcgaaatacctaataagagggtctcaacaatcaatggttccttcagttttaggaataattgatgaagatatgtttgctccgtggcatattctaaaagacagtttaactggtgaatgtaacatttttgagacagcgttaggaaagagcatttcggtttatatgagtgaaaatcctgaaatgaatcaaatttccaatggagcaatggcttttgatagtggattagttacttcgcatttggttaatgaatgcaaaagtgttttcggtgatgaaattaaaacattagttgatgttggtggtggtactggtactgcactcagagcaatttcgaaagcgttccccaatattaagtgcacactctttgatcttcctcatgttatagctgattcacctgaaattccaactattacaaaagtatcgggagacatgttcaagtctattccaagtgctgatgccatatttatgaagaacatccttcacgattggaacgatgatgaatgcattcaaattctaaagcgatgcaaagatgtagtatcagcgggagggaaacttattatggttgaaatggtattggacgaggattcgtttcatccatattcaaaacttagactcacatctgatatagatatgatggttaacaatggaggtaaagagagaaccgaaaaagaatgggaaaagctttttgatgcagcaggttttgctagttgcaaatttactcaaatgtcagtaggtttcgcagctcaatctataattgaggtttattga

SEQ ID NO: 523 - protein, 346 aa, Papaver somniferum
METVSKIDQQNQAKIWKQIYGFAESLVLKCAVQLEIAETLHNNVKPMSLSELASKLPVAQPVNEDRLFRIMRYLVHMELFKIDATTQKYSLAPPAKYLLRGWEKSMVDSILCINDKDFLAPWHHLGDGLTGNCDAFEKALGKSIWVYMSENPEKNQLFNAAMACDTRLVTSALANECKSIFSDGISTLVDVGGGTGTAVKAISKAFPDIKCTIYDLPHVIADSPEIPNITKISGDMFKSIPSADAIFMKCILHDWNDDECIQILKRCKEALPKGGKVIIVDVVIDMDSTHPYAKIRLTLDLDMMLNTGGKERTKEEWKTLFDAAGFASHKVTQISAVQSVIEAYPY

SEQ ID NO: 524 - DNA, 1041 bp, Papaver somniferum
atggaaacagtaagcaagattgatcaacaaaaccaagcaaaaatctggaaacaaatttacggtttcgcagaatcactagttctgaaatgtgcagtccaactagagattgctgaaacacttcacaacaatgtcaaacccatgtctttatccgaattggcatcgaaacttcccgttgctcaacccgttaacgaagaccgtctgttccgaattatgcgttacttggttcacatggagctcttcaaaatagatgctaccacgcagaaatactcattagctccaccagctaagtatttgttgagaggctgggagaaatcaatggttgattcaattttatgcataaatgataaggatttcttagctccatggcaccatttaggcgacggtttgaccggtaactgtgacgcttttgagaaagcgttggggaagagtatttgggtgtatatgagtgaaaatcctgaaaagaatcaattgtttaatgcagcaatggcttgtgatactagattggttacttctgcattggctaatgagtgcaaaagtattttcagtgatggaatcagtacactggttgatgtcggcggtggtacgggtactgcagtgaaagccatatctaaagcttttccggatattaagtgcactatctatgatcttcctcatgtcatagctgattctcctgaaatccccaatatcactaaaatttctggagatatgttcaagtctattcctagtgctgatgccatcttcatgaagtgcatacttcatgactggaacgatgacgaatgcattcaaatcttgaagagatgcaaagaagcattaccaaaaggtggcaaagttattatcgtggatgtcgtgatagacatggattcgactcatccatatgcaaaaattagactcacactggatttggatatgatgcttaacactggtggaaaagagagaaccaaagaagaatggaagacactttttgatgccgctggttttgctagccacaaagtcactcagatatctgctgtccaatctgtaattgaggcttacccttattaa

SEQ ID NO: 525 - protein, 354 aa, Papaver somniferum
MEIKLEDQEQEMRNQGHVWNIICGSVDSSVLKCTIELGILDTIHNSSKPMTLSSLSSASPSLSTLKAENLYRMLRYLSHMNLIAVNAAEGDETFSLTGISKLLLKNQERSLKDWVLGIDDEHSINGWHELTDYCLSADDAPTPFVKLHGKTIWELAEEVPEVNALINNAMACDTRMVMPAFVQGCDIILKGIKKLVDIGGGTGAAMSYIVKAFPEIKCMAFDLPHVVAAAPEVPGVEMVGGDMFESIPPADALLLKFMLHNWKDAECMKLLKRCKETIPANNGKVIIIEMVLDQDEGDDDLTQARLSLDLDMMLSSGGKERTKDEWRILLEEAGFNKIEFIPIFAIQSVIVAYA

SEQ ID NO: 526 - DNA, 1065 bp, Papaver somniferum
atggaaatcaaactagaagatcaagaacaagaaatgagaaaccaaggtcatgtttggaacataatctgtggtagtgttgattcatcagtacttaaatgtactattgagttaggcattcttgatacaattcacaattcatccaaacccatgacattatcttccttatcatcagcatcaccatctttatctacactcaaagctgaaaacttgtacagaatgttaaggtacttatctcatatgaatcttattgcagtgaatgcagctgaaggagatgagacattttctttaacaggtatatctaaattactgcttaagaatcaagaaagaagtttgaaagattgggttctcggtattgatgatgagcattcgattaacgggtggcatgagctaactgattattgtttatccgcggatgatgcgccaactccttttgtgaagttgcacgggaagaccatatgggaattagctgaagaagttcctgaagttaatgcacttattaacaatgccatggcttgcgatactaggatggtgatgcctgcatttgtacaaggttgtgatattatcttgaagggcattaaaaagttggtagatattggtggtggtaccggtgctgcaatgagttatattgttaaggctttccctgagattaaatgtatggcttttgatttgcctcatgttgttgctgctgcaccggaggttccaggtgtggaaatggttggtggcgacatgtttgaatccatcccccctgctgatgctcttttattgaagtttatgctgcataactggaaagacgccgagtgcatgaaactactgaagaggtgtaaggagacaattcctgcaaataatgggaaagttatcataatagaaatggttttggatcaagacgaaggtgatgatgatttgacacaagctagattaagtcttgatctagatatgatgttgagttcaggagggaaagaaaggactaaagatgaatggagaattttacttgaagaagcaggtttcaataagattgaattcattcctatttttgctattcaatcggttattgtcgcatatgcctag

SEQ ID NO: 527 - protein, 352 aa, Papaver somniferum
MEIQLQDQEQEMQYQGQIWNHICGNVDTQVLKCAIKLGVFDTIQNSDKSMLDLTEMSSSLSLSPIKPENLYRLLRYLTHMNLVTLTSVEGTEKFSLTDLSKLLLGNQEKSLKDWALGIGHEEGMGVWHELSSSCSMLAGGPTPWEMVFGEGCYEYTDKELGDTFNKAMSSDTRLAMPAVIRGCGKILSGLNSLVDVGGGNGTAMSYVVKAFPHVKCTVFDLPKVVERAQECHGVEFIGGDMFTSIPPADAVFLKFMLHNWGEAESINILRKCKEAIPADKGMVIIMDIVLDQDDEDDIDIVRAKLSLDLDMMCIGGRERTKEEWKNLLEISGFTRHEFLPIVAIQSIIVAYP

SEQ ID NO: 528 - DNA, 1059 bp, Papaver somniferum
atggaaattcaactgcaagatcaagaacaagagatgcagtaccaaggtcagatatggaatcatatttgtggaaatgttgatacacaagttcttaaatgtgcaattaaattaggtgtttttgataccattcagaactctgataagtccatgttagacttaaccgagatgtcaagctcattatctttatctccaatcaaacccgaaaacttatatcgactactaagatacttgactcatatgaatcttgttacccttacttcagttgaaggaactgaaaagttttcattaaccgacttatccaagttactacttggaaatcaagaaaagagtttgaaggactgggcactaggcatcggccacgaagaggggatgggagtatggcacgaactaagcagctcttgctcgatgctggccggtgggccgacgccttgggagatggtttttggtgaaggttgttatgagtatacagataaagaactgggtgacacattcaacaaagctatgtctagtgataccagattggcaatgcctgcagtaatccgaggttgtggtaagattttgagtggacttaattcattagttgacgtcgggggtggtaatggtaccgctatgagttatgttgttaaggcatttcctcatgtgaaatgcacggttttcgatttacccaaagtcgttgagagggctcaggaatgccatggtgttgagtttattggtggtgatatgtttacttcaatccctcctgctgatgctgtttttctaaagttcatgctacacaactggggagaggctgaaagtataaatatactgaggaagtgcaaggaagcaattccggcagataaaggtatggtgatcatcatggacatagtgctggatcaagatgacgaagatgatattgatatagtacgagcaaaattgagcctcgatctggatatgatgtgtataggaggtagggaaaggactaaagaagagtggaaaaatctacttgagatatctggctttacgaggcatgaattccttccaattgttgccatacagtcgatcattgttgcgtatccttaa

SEQ ID NO: 529 - protein, 355 aa, Papaver somniferum
MDIAEERLKGQAEIWEQMFAFVDSMALKCAVELGIPDIINSHGRPVTMSEIINSFKTTTSSSSSPNVEYLTRVMRLLVHNRVFSSQFHQESNETLYGLTRSSKWLLKDSEFNVSTLVLFETDPILLKPWQYLGECVQEGGFPFEKAYGCKIWEFALANPQFNEFLNSALRCTTSTIINEMLVEYKDGFNSIKSLVDVGGGTGTMMAQIVEANPHIEGINFDLPHVVATAPDYPGVKHVGGDMFVDIPEADAIMMKSVLHDWNDEYCAMILKSCYKALAKKKNGKVVLVEGVLQPNSNDTFDKTGLMFDMVMIAHTSAGKERTEEEWKILLNNAGFPRYNIIKTSAFHCIIEAFPE

SEQ ID NO: 530 - DNA, 1068 bp, Papaver somniferum
atggatattgcagaagaaaggttgaaagggcaagctgaaatatgggagcaaatgtttgcatttgtggattcaatggcattgaaatgcgctgttgaacttggtatacccgatatcataaactctcatggccgtccggtcactatgtcggagatcatcaacagcttcaaaacaaccacatcatcatcatcatctccgaacgttgaatatcttacgcgtgtaatgagattattggttcataaccgtgtattctcttcccaatttcaccaagaaagcaatgaaaccttgtatggtttaactcgctcgtcaaaatggttattgaaagattctgaatttaatgtgtcgacattggttttattcgaaactgatccgatattattaaaaccatggcaatatttgggtgaatgtgttcaagaaggtggttttccttttgaaaaagcttatgggtgcaagatttgggagtttgctttagctaaccctcaatttaatgagtttttgaatagtgcactgcgatgtacaacttcaacaataatcaacgagatgctagtcgaatataaagatggattcaacagcataaaatcgcttgttgatgtcggtggtggtactgggaccatgatggctcaaatagttgaggctaatccacatatagaaggtatcaattttgatttaccacatgtggtggctacagcacctgattacccaggggttaagcatgttggtggtgatatgtttgttgatatcccggaagctgacgctatcatgatgaagtcggtattgcacgactggaacgatgaatactgcgcaatgattttgaagagttgttataaagcattagcaaagaagaaaaatgggaaagtcgtacttgttgaaggtgtattgcaaccaaatagtaacgatacatttgataaaacaggattgatgtttgatatggtgatgatagcacatacttcagccggaaaagaaagaactgaagaagaatggaagatactattgaataatgctggtttccctcggtataatatcatcaaaacttctgcatttcattgtattatcgaggcttttccagaataa

SEQ ID NO: 531 - protein, 355 aa, Papaver somniferum
MDIAEERLKGQAEIWEQMFAFVDSMALKCAVELGIPDIINSHGRPVTMSEIINSFKTTTSSSSSPNVEYLTRVMRLLVHNRVFSSQFHQESNETLYGLTRSSKWLLKDSEFNVSTLVLFETDPILLKPWQYLGECVQEGGFPFEKAYGCKIWEFALANPQFNEFLNSALRCTTSTIINEMLVEYKDGFNSIKSLVDVGGGTGSIIAEIVKAHPHIQGINFDLPHVVATAAEFPGVKHVGGDMFVDIPEADAVIMKWILHDWSDEDCTIILKNCYRAIRKKKNGKVIIVDCVLRPDGNDLFDKLGLIFDVLMMAHTTAGKERTEAEWKILLNNAGFPRYNVIRTPAFPCIIEAFPE

SEQ ID NO: 532 - DNA, 1068 bp, Papaver somniferum
atggatattgcagaagaaaggttgaaagggcaagctgaaatatgggagcaaatgtttgcatttgtggattcaatggcattgaaatgcgctgttgaacttggtatacccgatatcataaactctcatggccgtccggtcactatgtcggagatcatcaacagcttcaaaacaaccacatcatcatcatcatctccgaacgttgaatatcttacgcgtgtaatgagattattggttcataaccgtgtattctcttcccaatttcaccaagaaagcaatgaaaccttgtatggtttaactcgctcgtcaaaatggttattgaaagattctgaatttaatgtgtcgacattggttttattcgaaactgatccgatattattaaaaccatggcaatatttgggtgaatgtgttcaagaaggtggttttccttttgaaaaagcttatgggtgcaagatttgggagtttgctttagctaaccctcaatttaatgagtttttgaatagtgcactgcgatgtacaacttcaacaataatcaacgagatgctagtcgaatataaagatggattcaacagcataaaatcgcttgttgatgtcggtggtgggaccgggtcgataatcgctgaaatagttaaggctcatccacacatacaaggcatcaattttgatctaccacatgtagtggctacagcggctgaatttccaggggtgaagcatgtcggtggtgatatgtttgtcgatattccggaagctgatgctgtcatcatgaagtggatattgcacgactggagtgacgaagactgtacaattatactgaagaattgttaccgagcaataagaaagaagaaaaacggaaaagtcataattgttgattgtgtgttgcgaccagatggaaatgacttattcgataaattgggattgatatttgatgtgctgatgatggcacatactacagctggaaaagaaagaacagaagcggaatggaagatcttattaaataatgcaggttttcctcgttacaatgtcattcgaactccggcatttccttgcatcatcgaggcctttccagaataa

SEQ ID NO: 533 - protein, 346 aa, Papaver somniferum
MEEAMDVHEQAHLWKLIYGFVDTLVVRSAVELGIFDIINNNLKPMTVLDLASKLPISNPCSDRLYRILRYLVHVRLLKVTDIDGLKRYSIQPVARFLLRDYDKSMAPIILGMTKKEFMSSWHHIKDGLSDDGSTAFDKAMGMSFFEYLEENPSQSKLFNEAMAGETRLLTASLINDCKDIFQGIESLVDIGGGNGTTIKAISDAFPHISCALFDLPHVVADSNDDHPNIKRVAGDMFESIPTSQAILLKLILHDWSDEDCVRILKRCREAVPKEGGKVIIVDVALEEESKHELNNPRLVLDIDMLVNTGGKERSREDWEKLTKLAGFGGYKIRHIAAIQSVIEITP

SEQ ID NO: 534 - DNA, 1041 bp, Papaver somniferum
atggaagaagccatggatgtccatgagcaagcacacctgtggaagctcatctacggcttcgtcgacaccttagtagtaaggtcggcggtggagctcggaatcttcgacatcatcaacaacaatttgaagcccatgacagtgctggacttggcctcaaagctccccatctccaacccctgttcggatcggttgtatcgaattcttcgatacctagttcatgtccgccttctcaaggtgaccgatatcgatggcctcaagcgctactcgatccaacccgtcgcgaggttcctactaagggactacgacaagagcatggcgcctatcattctgggcatgactaagaaggagttcatgtcttcatggcaccacattaaggatggattgagcgacgacgggagcaccgccttcgacaaggccatggggatgagcttcttcgagtacttggaggagaaccccagccagagcaagctcttcaatgaggccatggcgggggagactaggcttctcactgcttccctcatcaatgactgcaaagacatctttcaaggaattgagtccctggttgatatagggggaggaaatggcaccaccattaaggccatttccgatgcgtttccgcacatcagttgcgccctcttcgacctccctcatgtcgtcgctgactccaacgatgatcacccgaatattaaacgcgtcgctggagacatgttcgagtccatccctacctcccaagccatcttgctcaagttgattttgcacgattggagcgacgaagattgcgttcggattctaaagcgatgcagggaggcggtgccgaaggaaggggggaaggtgatcatagtggatgtggcattagaagaggagtccaagcatgagctgaacaatccaaggttggttttagacattgatatgttggtgaacactggagggaaagagaggagcagagaggattgggagaagctcaccaaactagcagggtttggagggtacaagattaggcacattgctgctatacaatcagtcattgaaatcactccttaa

SEQ ID NO: 535 - protein, 343 aa, Papaver somniferum; identical to SEQ ID NO: 483

SEQ ID NO: 536 - DNA, 1032 bp, Papaver somniferum; identical to SEQ ID NO: 443

SEQ ID NO: 537 - protein, 377 aa, Papaver somniferum
MTMNGNGHGQEHHAAAADYHVDVSYLSENANLGKLICIPMALRAAMELNVFQIFSKFGPDAKVSASELVSKIPKASGNPDAAMYLDRILRLLGASSILSVSTRMNSTGDHAVVPERLYGLTSASYCLVPREEDEVSLVPLLVLQSDKVIVDSFFKLKEMVMEKDVVPFDAAHGTSIFEYACKEPRLNKVFNEGMGAFSVVVFEAVFKYYDGFSGMKELLDVGGGIGTSIRKIVSKYRSVRGINFDLPHVISVAPQYPGVEHVEGDMFEEVPKAQNMLLKWILHDYDDERCVKLLKNCWNSLQVGGKVMIIEFVVPDRLVNNAESFNALNSDLIMMALNPGGKERTVSEFNDLADAAGFVKCVPFLISEGLHLIEFHK

SEQ ID NO: 538 - DNA, 1134 bp, Papaver somniferum
atgactatgaatgggaatggtcatggtcaagaacatcacgctgctgctgctgattaccacgttgatgtctcttacctttctgaaaatgcaaacttgggtaagttaatatgtattccaatggcactgagagctgcaatggagttaaacgtcttccagatattttcaaaattcgggccggacgcaaaggtttccgcttctgaattagtctctaaaataccgaaggcatccggtaaccctgacgcagccatgtatttagataggattctccgattactcggtgcaagctcaattctctctgtctctactagaatgaacagtaccggagatcatgcagtagtaccggagagactgtatggattaacgagtgcatcgtattgtttagtgcctcgagaagaagatgaagtttcgctagtaccactcttggtattgcaatctgataaggttatcgttgatagttttttcaaactgaaagagatggttatggagaaagatgtagtgccgtttgacgctgctcatggtactagcatcttcgagtatgcttgtaaagagccaaggttgaataaggttttcaacgagggaatgggagctttctccgttgttgtttttgaagctgtttttaagtattacgatgggttttctgggatgaaagagttgttagatgttggtggtggtatcggtacttctattagaaagattgtctcgaaataccgttccgttcgtggtatcaacttcgacttgcctcatgtcatttctgttgctcctcaataccctggtgtagagcatgtcgaaggagacatgtttgaagaagtccccaaggctcaaaacatgctgctcaaatggatacttcacgattatgacgatgaacgttgcgtgaagttgttgaagaactgctggaattcgttacaagtgggtggaaaagttatgataattgagtttgttgttcctgacagacttgtcaacaatgcagagtcgttcaacgcgttgaactctgatttgattatgatggctctgaatccaggcggtaaagaacggacagtttccgaatttaacgatttagccgatgcagctggattcgtgaagtgtgtacctttcttgatctctgaaggacttcatctcattgagtttcataaatga

SEQ ID NO: 539 - protein, 360 aa, Papaver somniferum
MGSIQNVDEDIQACRYAMELASASVPVMVLKTAIELDILEIIKKSGPGTQISVSEIVSQIQNLKNPDAPVMLDRMLRLLASYNILTCSLKDGGNDDKVERLYGLAPVCKFLTKNEAGCSMSALLLMNQDKVLMESWYHLKDAILDGGIPFNKAYGVHAFEYHGKDLRFNKVFNKGMSDHTTITMNKILETYKGFEGLNSIVDVGGGVGATVSMIISKYPTIQGINFDLPHVIQDAPSFPGIKHVGGDMFASVPNADAIFMKWILHDWSDEHSVKILKNCYDALPKNGKVIIVECIIPEVSDSSVAGHGVFHLDNIMLAHNPGGKERSLKQFENLAKDTGFTDFQVVCSAYDTYVMEFYKN

SEQ ID NO: 540 - DNA, 1083 bp, Papaver somniferum
atgggttcgatccagaacgtagacgaagatatacaagcatgtcgatatgctatggaattagccagtgcgtcagtaccagtgatggtgcttaaaacagccattgagctagacattcttgaaatcatcaagaaatcaggtcctggtacacagatcagtgttagtgaaattgtatctcaaatccagaatctcaagaacccagatgcgcctgttatgctggatcgtatgcttagattgttagccagttataacatcctcacttgcagtcttaaagatggggggaacgatgataaagttgaaagactttatggacttgctccagtctgtaaattcttgaccaagaatgaagctggttgttcaatgtctgctttacttcttatgaatcaagataaggtcctcatggaaagctggtaccatttgaaagatgcaatcctcgatggaggaattccctttaacaaagcttatggtgtgcacgcatttgaataccatggaaaagaccttaggttcaacaaggtatttaacaagggaatgtctgatcacacaaccatcaccatgaacaaaatccttgaaacctacaagggtttcgaaggtttgaactccattgtcgatgttggtggaggcgttggtgcaaccgttagtatgatcatctccaagtaccccacaattcaaggtattaacttcgacttacctcacgtaatccaagacgctccatcattcccaggcatcaagcacgtcggtggtgacatgtttgccagtgttccaaatgcagatgcaattttcatgaaatggattcttcacgattggagtgatgaacacagtgtcaaaatcttgaagaactgctacgatgcattacctaaaaatggaaaagtgattattgttgaatgcattataccagaagtgtcagacagtagcgttgcaggtcatggtgtattccatttggacaacattatgttggcgcataaccctggtggtaaagaaagatcactaaaacaatttgaaaacctggctaaagatactggattcactgattttcaagtggtctgttctgcttatgatacttacgttatggaattctacaaaaactag

SEQ ID NO: 541 - protein, 356 aa, Papaver somniferum
MGSSSIDVKPAETQEVSIKDQAQLWNMIYGFADSLVVRCAVELGIPDIIKNNNGPITLAQLSSKLPIPNVNSDHLYRIVRYLINLNILQQEICRNVKVYSLKPVGTLLLRDAERSMVPILLGNTQKDFLVPWHFVKEGLVNGSTTAFEKGMGMDIWKYLEGNPDQSQLFNEGMAGETSLLTKTLIEDCRDTFQNLDSLVDIGGGNGTTIKAIYEAFPHIKCTLYDLPHVISNSTDHPNIVKIPGDMFKSVPSAQAILLKLILHDWTDEQCVNILMRCKEAIHQETGKVIIVDVALEEESEHELTKTRLILDIDMMVNTGGRDRTAEDWENLLKRAGFRSHKIRPIRAIQSVIEAFP

SEQ ID NO: 542 - DNA, 1071 bp, Papaver somniferum
atgggaagtagcagtatagatgtgaaaccagctgaaacacaagaagttagcatcaaagatcaagctcaattatggaatatgatctacggttttgctgattctcttgttgttcgttgcgcagtagagcttggcattccagatattatcaaaaacaataacgggccaatcacacttgcacaactttcatcaaaactcccaattccgaatgtcaactcggatcacttgtacagaattgtaagatatttaataaacctgaatatcttacaacaagaaatttgtcgtaatgttaaggtctactcacttaaaccagttggtactttacttttaagagatgcagaaagaagtatggtgccaatattattaggcaatacacagaaagatttcttggttccatggcatttcgtgaaagaaggtttagtaaatggaagtacaacagcatttgagaaaggaatgggtatggatatatggaagtatttagaaggtaatccagatcaaagtcagttgtttaacgaaggaatggctggagaaacaagtcttttaactaaaactctaatcgaagattgtagagatactttccaaaatttggattctctagtcgatattggtggaggaaatggtacaacaattaaggcaatctatgaagcttttcctcatatcaaatgtacactttatgatcttcctcatgttattgctaactcaactgatcacccgaatatcgtaaaaatacccggtgatatgttcaagtctgttcccagtactcaagctatcttactcaagttgatcttgcatgactggactgatgaacaatgtgtcaacattctaataaggtgtaaagaagcaataaatcaagaaacagggaaagtgatcatagtagatgtagcacttgaagaagaatctgaacatgaacttacaaagacaagattgattcttgatattgatatgatggtgaatacaggtggtagagagaggactgcagatgattgggaaaatttgctcaaacgtgcaggctttcggtctcataagatcagacagattcgtgctattcagtctgtcattgaagccttcccatag

SEQ ID NO: 543 - protein, 358 aa, Papaver somniferum
MDIKLEDEEQEIKYQGHVWNMICGSVNSSVLKCTIVLGLFDTIHNSSKPMTLSSLSSASPSLSPLKTENLYRLLRYLSHMNLIVINSIQGSDDTFSLTDTSKLLLSNQERSLKDWVLGIDDPLAINGWHELTDYCLSPVDAPVPFVKMHGKTMWEFAADIPEVNELINNSMACDTKLVMPAFLQGCRGILNKGIVKKMVDIGGGTGAAMSYVVKAFPDIKCMVFDLPHVVANAPEIEGVELVGGDMFEFIPPADALLLKFILHNWDDVGCIQLLKKCKETISAEHGKVIIIEMVLEEDDQDNDALAQARLSLDLDMMVCSGGRERTKDEWRILVEEAGFSKIEFISIFAIQSVIVAYP

SEQ ID NO: 544 - DNA, 1077 bp, Papaver somniferum
atggatatcaaattagaagatgaagaacaagaaataaaataccaaggtcatgtttggaacatgatctgcggtagtgtgaattcatccgtacttaaatgtacgattgttttaggtcttttcgatacaattcataattcatccaaacccatgaccctatcctccctatcatcagcatcaccatctttatctcctctcaaaaccgaaaacttatatagactattaagatacttatctcatatgaatctcatcgtaatcaattcaattcaaggaagtgatgatacattttcattaacagatacatctaagttactacttagtaatcaagaaagaagtttgaaggattgggttcttggtatcgacgatccactcgcaattaacgggtggcatgagttaactgattattgtttatcccccgttgatgcgccggttccttttgtaaagatgcacgggaaaaccatgtgggagtttgctgcagatatccctgaagttaatgagctaatcaataactccatggcttgtgatactaaattagtaatgcctgcatttttgcaaggttgccgtggtatcttgaataaaggtattgttaagaagatggttgacatcggtggtggtacaggtgctgctatgagttatgttgttaaggcttttcctgacataaaatgtatggtttttgatttgcctcatgttgttgctaacgcaccggagattgaaggtgtggaattggttggtggtgatatgtttgaattcatccctcctgctgatgctcttttgttgaagttcattctccataactgggatgatgtcggatgcatacagctactaaagaagtgcaaggagacaatttcagctgagcatgggaaagttatcataatagaaatggttttggaagaagacgaccaagacaatgatgctttggcacaagcaagattaagtcttgatttagatatgatggtatgttcaggaggaagagaaaggacgaaagatgaatggagaattttagtggaagaggctggtttcagtaagattgaattcatttctatttttgccattcaatcagttattgttgcatatccataa

SEQ ID NO: 545 - protein, 375 aa, Papaver somniferum
MGSGHHSKHKGDHHEEEHSKDKQEEQACMFALQLASASVPVMVLRAAIEMDVLEIMNRAGPGSELSAAYIASQILNVTNPNASVMLDRMLRLLASYKILTCSDRTLDDGTTERVYGLELVCKFLVKDDDGVSMAPLLLMNQDKILLESWFHLKDAVVTGGIPFNLAYGMNAFEYPATDARFNTVFNKGMSDHTAIFMKKILETYKGFEGINSIVDVGGGVGVSLDMILTKYPSMKGINFDLPHVIKDAPAYESAVEHVGGDMFVSVPKGTDAVFMKWILHDWSDEFCTKVLKNIHDALPEYGKLILVECIIPSTTEPTLEALGVYHVDNMMMAYNPGGKERTEKEFDALAKATGFSGVKLICSAFNTWIMECHKN

SEQ ID NO: 546 - DNA, 1128 bp, Papaver somniferum
atgggttcaggccatcacagcaaacacaaaggtgatcatcatgaagaagaacattctaaagataaacaagaagaacaagcatgtatgttcgcattacaattggctagtgcatcagtaccagtgatggtattaagagctgcaattgaaatggatgttttggagataatgaacagagctggtccaggttctgagcttagcgctgcatatattgcatcacagattctcaatgttacgaacccgaatgctagtgttatgcttgaccgtatgttgagattattggctagttataagattcttacttgttctgatagaactcttgatgatggcacaactgagagagtctatggtcttgaacttgtttgcaagtttcttgtcaaggatgatgatggtgtttccatggctcctttgcttttgatgaaccaagataagatcttgttggagagctggttccatttgaaagacgcggttgtgaccggcggtatcccatttaacttggcatacggcatgaacgcattcgaatacccagcaacagatgcaaggttcaacacggtgttcaacaaaggaatgtcagaccacactgcaattttcatgaagaagattttagaaacgtacaaaggtttcgaaggtataaattcaatcgtcgacgttggtggtggtgttggtgtcagtctagacatgattcttacaaaatacccatccatgaaaggtattaacttcgatttaccacacgtaatcaaagacgctccagcttacgaatccgcggtcgaacatgtcggaggagatatgtttgtgagtgttccaaaaggaactgatgccgtattcatgaaatggattcttcatgactggagtgatgagttttgtaccaaagttttgaagaatattcatgatgctttacctgaatatggaaaattgatactagtggaatgcattattccgtcaacaactgaaccaactcttgaagctttaggtgtttaccatgttgataatatgatgatggcttataaccctggtggcaaagaaaggactgagaaagaatttgatgctttggctaaagcaactggattttctggggttaagctcatctgttctgcctttaacacttggattatggagtgccacaagaactaa

SEQ ID NO: 547 - protein, 355 aa, Papaver somniferum; identical to SEQ ID NO: 529

SEQ ID NO: 548 - DNA, 1068 bp, Papaver somniferum; identical to SEQ ID NO: 530

SEQ ID NO: 549 - protein, 376 aa, Papaver somniferum
MTMNGNGHGQEHHAAADYHVDVSYLSENANLGKLICIPMALRAAMELNVFQIFSKFGPDAKVSASELVSKIPKASGNPDAAMYLDRILRLLGASSILSVSTRMNSTGDHAVVPERLYGLTSASYCLVPREEDEVSLVPLLVLQSDKVIVDSFFKLKEMVMEKDVVPFDAAHGTSIFEYACKEPRLNKVFNEGMGAFSVVVFEAVFKYYDGFSGMKELLDVGGGIGTSISKIVSKYRSVRGINFDLPHVISVAPQYPGVEHVEGDMFEEVPKAQNMLLKWILHDYDDERCVKLLKNCWNSLQVGGKVMIIEFVVPDRLVNNAESFNALNSDLIMMALNPGGKERTVSEFNDLADAAGFVKCVPFLISEGLHLIEFHK

SEQ ID NO: 550 - DNA, 1131 bp, Papaver somniferum
atgactatgaatgggaatggtcatggtcaagaacatcacgctgctgctgattaccacgttgatgtctcttacctttctgaaaatgcaaacttgggtaagttaatatgtattccaatggcactgagagctgcaatggagttaaacgtcttccagatattttcaaaattcgggccggacgcaaaggtttccgcttctgaattagtctctaaaataccgaaggcatccggtaaccctgacgcagccatgtatttagataggattctccgattactcggtgcaagctcaattctctctgtctctactagaatgaacagtaccggagatcatgcagtagtaccggagagactgtatggattaacgagtgcatcgtattgtttagtgcctcgagaagaagatgaagtttcgctagtaccactcttggtattgcaatctgataaggttatcgttgatagttttttcaaactgaaagagatggttatggagaaagatgtagtgccgtttgacgctgctcatggtactagcatcttcgagtatgcttgtaaagagccaaggttgaataaggttttcaacgagggaatgggagctttctccgttgttgtttttgaagctgtttttaagtattacgatgggttttctgggatgaaagagttgttagatgttggtggtggtatcggtacttctattagtaagattgtctcgaaataccgttccgttcgtggtatcaacttcgacttgcctcatgtcatttctgttgctcctcaataccctggtgtagagcatgtcgaaggagacatgtttgaagaagtccccaaggctcaaaacatgctgctcaaatggatacttcacgattatgacgatgaacgttgcgtgaagttgttgaagaactgctggaattcgttacaagtgggtggaaaagttatgataattgagtttgttgttcctgacagacttgtcaacaatgcagagtcgttcaacgcgttgaactctgatttgattatgatggctctgaatccaggcggtaaagaacggacagtttccgaatttaacgatttagccgatgcagctggattcgtgaagtgtgtacctttcttgatctctgaaggacttcatctcattgagtttcataaatga

SEQ ID NO: 551 - protein, 291 aa, Papaver somniferum
MLDRMLRLLASYKILTCSDRTLDDGTTERVYGLELVCKFLVKDDDGVSMAPLLLMNQDKILLEIWFHLKDAVVTGGIPFNLAYGMNAFEYPATDARFNTVFNKGMSDHTAIFMKKILETYKGFEGINSIVDVGGGVGVSLDMILTKYPSMKGINFDLPHVIKDAPAYESAVEHVGGDMFVSVPKGTDAVFMKWILHDWSDEFCTKVLKNIHDALPEYGKLILVECIIPPTCEPTLEALGVYHVDNMMMAYNPGGKERTEKEFDALAKATGFSGVKLICSAFNTWIMECHKN

SEQ ID NO: 552 - DNA, 876 bp, Papaver somniferum
atgcttgaccgtatgttgagattattggctagttataagattcttacttgttctgatagaactcttgatgatggcacaactgagagagtctatggtcttgaacttgtttgcaagtttcttgtcaaggatgatgatggtgtttccatggctcctttgcttttgatgaaccaagataagatcttgttggagatctggttccatttgaaagacgcggttgtgaccggcggtatcccatttaacttggcatacggcatgaacgcattcgaatacccagcaacagatgcaaggttcaacacggtgttcaacaaaggaatgtcagaccacactgcaattttcatgaagaagattttagaaacgtacaaaggtttcgaaggtataaattcaatcgtcgacgttggtggtggtgttggtgtcagtctagacatgattcttacaaaatacccatccatgaaaggtattaacttcgatttaccacacgtaatcaaagacgctccagcttacgaatccgcggtcgaacatgtcggaggagatatgtttgtgagtgttccaaaaggaactgatgccgtattcatgaaatggattcttcatgactggagtgatgagttttgtaccaaagttttgaagaatattcatgatgctttacctgaatatggaaaattgatactagtggaatgcattattccaccaacatgtgaaccaactcttgaagctttaggtgtttaccatgttgataacatgatgatggcttataaccctggtggcaaagaaaggactgagaaagaatttgatgctttggctaaagcaactggattttctggggttaagctcatctgttctgcctttaacacttggattatggagtgccacaagaattaa

SEQ ID NO: 553 - protein, 358 aa, Papaver somniferum
MDIKLEDEEQEIKYQGHVWNMICGSVNSSVLKCTIVLGLFDTIHNSSKPMTLSSLSSASPSLSPLKTENLYRLLRYLSHMNLIVINSIQGSDDTFSLTDTSKLLLSNQERSLKDWVLGIDDPLAINGWHELTDYCLSPVDAPVPFVKMHGKTMWEFAADIPEVNELINNSMACDTKLVMPAFLQGCRGILNKGIVKKMVDIGGGTGAAMSYVVKAFPDIKCMVFDLPHVVANAPEIEGVELVGGDMFEFIPPADALLLKFILHNWDDVGCIKLLKKCKETISAEHGKVIIIEMVLEEDDQDNDALAQARLSLDLDMMVCSGGRERTKDEWRILVEEAGFSKIEFISIFAIQSVIVAYP

SEQ ID NO: 554 - DNA, 1077 bp, Papaver somniferum
atggatatcaaattagaagatgaagaacaagaaataaaataccaaggtcatgtttggaacatgatctgcggtagtgtgaattcatccgtacttaaatgtacgattgttttaggtcttttcgatacaattcataattcatccaaacccatgaccctatcctccctatcatcagcatcaccatctttatctcctctcaaaaccgaaaacttatatagactattaagatacttatctcatatgaatctcatcgtaatcaattcaattcaaggaagtgatgatacattttcattaacagatacatctaagttactacttagtaatcaagaaagaagtttgaaggattgggttcttggtatcgacgatccactcgcaattaacgggtggcatgagttaactgattattgtttatcccccgttgatgcgccggttccttttgtaaagatgcacgggaaaaccatgtgggagtttgctgcagatatccctgaagttaatgagctaatcaataactccatggcttgtgatactaaattagtaatgcctgcatttttgcaaggttgccgtggtatcttgaataaaggtattgttaagaagatggttgacatcggtggtggtacaggtgctgctatgagttatgttgttaaggcttttcctgacataaaatgtatggtttttgatttgcctcatgttgttgctaacgcaccggagattgaaggtgtggaattggttggtggtgatatgtttgaattcatccctcctgctgatgctcttttgttgaagttcattctccataactgggatgatgtcggatgcataaagctactaaagaagtgcaaggagacaatttcagctgagcatgggaaagttatcataatagaaatggttttggaagaagacgaccaagacaatgatgctttggcacaagcaagattaagtcttgatttagatatgatggtatgttcaggaggaagagaaaggacgaaagatgaatggagaattttagtggaagaggctggtttcagtaagattgaattcatttctatttttgccattcaatcagttattgttgcatatccataa

SEQ ID NO: 555 - protein, 362 aa, Papaver somniferum
MAISDPMEIKLEDQEQEMRNQGHVWNIICGSVDSSVLKCTIELGILDTIHNSSKPMTLSSLSSASPSLSTLKAENLYRLLRHLSHMNLIAVNSTEGNEIFSLTGISKLLLKNQERSLKDWVLGIDDEHSINGWHELTDYCLSADDAPTPFVKLHGKIMWELAEEVPEVNALINNAMACDTRMVMPAFVQGCDSILKGIKKLVDIGGGTGAAMSYVVKAYPEIKCMVFDLPHVVAAAPEIPGVEMVGGDMFESIPPADALLLKFMLHNWKDAECIKLLKRCKEAIPADQGKVIIIEMVLDQDEDDNDLTQARLSLDLDMMLSSGGKERTKDEWRILLEEAGLSKIEFIPIFAIQSVIVAYPLE

SEQ ID NO: 556 - DNA, 1089 bp, Papaver somniferum
atggcgatatcggatccaatggaaatcaaactagaagatcaagaacaagaaatgagaaaccaaggtcatgtatggaacataatctgtggtagtgtagattcatcagtacttaaatgtacaattgagttaggcattcttgatacaattcacaactcatccaaacccatgacattatcttccttatcatcagcatcaccatctttatctacactcaaagctgaaaacttgtacagattattgagacacttatctcatatgaatcttattgctgtcaattcaaccgaaggaaacgagatattttctttaacaggtatatctaaattactgcttaagaatcaagaaagaagtttgaaagattgggttctcggtatcgacgatgagcattccattaacgggtggcatgagttaaccgattattgtttatcggccgacgatgcacccactccttttgtgaagttgcacgggaagatcatgtgggaattagctgaagaagttcctgaagttaatgcacttattaataatgctatggcttgtgatactaggatggtaatgcctgcatttgtgcaaggttgtgatagtatcttgaagggtattaagaagttagtcgacatcggtggtggcaccggagctgctatgagttatgttgttaaggcttatcctgagataaagtgcatggtttttgacctgcctcacgttgttgctgctgcaccggagattccaggtgtggaaatggttggtggcgacatgtttgaatccattccccctgctgatgctcttttattgaagttcatgcttcataactggaaagacgcagaatgcataaaactactaaagaggtgtaaggaggcaattcctgccgatcaagggaaagttatcataatagaaatggttttggatcaagacgaagatgacaatgatttgacacaagctagattgagtcttgatctagatatgatgctgagttcaggaggaaaagaaaggaccaaagatgaatggagaattttacttgaagaagctggtttaagtaagattgaattcattcctatttttgctattcagtcggttattgtcgcatatcctctcgagtga

SEQ ID NO: 557 - protein, 360 aa, Papaver somniferum
MAISDPMGSIQNVDEDIQACRYAMELASASVPVMVLKTAIELDILEIIKKSGPGTQISVSEIVSQIQNLKNPDAPVMLDRMLRLLASYNILTCSLKDGGNDDKVERLYGLAPVCKFLTKNEAGCSMSALLLMNQDKVLMESWYHLKDAILDGGIPFNKAYGVHAFEYHGKDLRFNKVFNKGMSDHTTITMNKILETYKGFEGLNSIVDVGGGVGATVSMIISKYPTIQGINFDLPHVIQDAPSFPGIKHVGGDMFASVPNADAIFMKWILHDWSDEHSVKILKNCYDALPKNGKVIIVECIIPEVSDSSVAGHGVFHLDNIMLAHNPGGKERSLKQFENLAKDTGFTDFQVVCSAYDTYV

SEQ ID NO: 558 - DNA, 1107 bp, Papaver somniferum
atggcgatatcggatccaatgggttcgatccagaacgtagacgaagatatacaagcatgtcgatatgctatggaattagccagtgcgtcagtaccagtgatggtgcttaaaacagccattgagctagacattcttgaaatcatcaagaaatcaggtcctggtacacagatcagtgttagtgaaattgtatctcaaatccagaatctcaagaacccagatgcgcctgttatgctggatcgtatgcttagattgttagccagttataacatcctcacttgcagtcttaaagatggggggaacgatgataaagttgaaagactttatggacttgctccagtctgtaaattcttgaccaagaatgaagctggttgttcaatgtctgctttacttcttatgaatcaagataaggtcctcatggaaagctggtaccatttgaaagatgcaatcctcgatggaggaattccctttaacaaagcttatggtgtgcacgcatttgaataccatggaaaagaccttaggttcaacaaggtatttaacaagggaatgtctgatcacacaaccatcaccatgaacaaaatccttgaaacctacaagggtttcgaaggtttgaactccattgtcgatgttggtggaggcgttggtgcaaccgttagtatgatcatctccaagtaccccacaattcaaggtattaacttcgacttacctcacgtaatccaagacgctccatcattcccaggcatcaagcacgtcggtggtgacatgtttgccagtgttccaaatgcagatgcaattttcatgaaatggattcttcacgattggagtgatgaacacagtgtcaaaatcttgaagaactgctacgatgcattacctaaaaatggaaaagtgattattgttgaatgcattataccagaagtgtcagacagtagcgttgcaggtcatggtgtattccatttggacaacattatgttggcgcataaccctggtggtaaagaaagatcactaaaacaatttgaaaacctggctaaagatactggattcactgattttcaagtggtctgttctgcttatgatacttacgttatggaattctacaaaaacctcgagtga

SEQ ID NO: 559 - DNA, 1062 bp, Papaver bracteatum
atgggttcacaagcaactgaaacacaagttgttagcctcgaagatcaagctcaaatatggaatataatctatgggttcgctgattctcttgttcttcgttgcgcagtacagattggcattccagatattatcaaaaacaataaagggtcaatcacacttgcacaactttcatcaaaactcccaattccagatgtcaattctggtcacttacaaagaattataagatatttagtacagttggatatcttacaacaagaaacttgtaatggtggagctgaaatggtttactcacttaaaccagctggtactttacttttaagagatgcaaaaataagtatggtaccaatgctattaggtttgacccaaaaagacttcatggtaccgtggcatttcattaaagaagttttaggaaatggaagtgcaacagcattcgagataggcatgggtaagacaatgtggcagtatttagctgataatcctgaacaaagtcagttgtttgatgaaggaatggcgggagatataacacttttaagtaaaactctaactgaagattgcagtgatatttttcaaggtttagattctcttgttgatgttggtggaggaaatggtgcagcaattatggcaatctatgaagcttttcctcatataaaatgtacactttttgatcttcctcatgttattgctagctctcataatcaccctaagatcgaaaaaatacccggtgatatgtttaagtctgttcccagtgctcaagccctcttactcaagtcgatcctgcatgactggactgatgaagagtgtgtcaaaattctaaagaactgtaaagaagcaataccaaaagagacagggaaagtgattatagttgatatagcacttgaagaagaatctactcatccacttgccaaaaaaagattggttcttgatattgatatgttggtgaataccggtggcagagagagaactgcagacgattgggaaaatttgctcaaaagtgcaggctttcggtctcataagatctcacccattcgcgctatgcagtctgtcattgaagccttcccatag

SEQ ID NO: 560 - DNA, 1041 bp, Papaver bracteatum
atggaaacagtaagcaagattgatcaacaaaaccaagcaaaaatctggaaacaaatttacggttttgcagaatcactagttctgaaatgtgcagttcaactagagattgctgaaacacttcacaacaatgtcaaacccatgtctttatccgaattagcatccaaacttccggttgctcaacccgttaacgaagaccgtttgttccgaattatgcgttacttggttcacatggaactcttcaagatagacgctaccacgcagaaatactcattagctccaccagctaagtatttgttgagagggtgggagaaatcaatggttgattcaattttatgcataaatgataaggatttcttagctccgtggcatcatttaggtgacggtttaaccggtaactgtgacgcttttgagaaagcgttggggaagagtatttgggtttatatgagtgaaaatcctgaaaagaatcaattgtttaatgcagcaatggcttgtgatactagattggttacttctgcattggctaatgagtgcaaaagtattttcagtgacggaatcagaacactggtggatgtcggcggcggtaccggtactgctgtgaaaaccatatctaaagcttttccggatattaagtgcactatctatgatcttcctcatgtcatagctgattctcctgaaattcccaatattactaaaatttctggagatatgttcaagtctattcctagtgctgatgccatcttcatgaagtgcatacttcacgactggaatgatgaggaatgcattcaaatcttgaagcgatgcaaagaagcattaccaaaagatggcaaagttattatcgtggatgtcgtgatagacatggattcgactcatccatatgcaaaaattagactcacattggatttggatatgatgctcaacactggtggaaaagagagaaccaaagaagaatggaagatactttttgatgccgctggttttgcaagccacaaagtcactcagatatctgctgtccaatctgtaattgaggcttacccttattaa

SEQ ID NO: 561 - DNA, 1050 bp, Papaver bracteatum
atggaagtagtatacaaaattgatcaagaaaatcaagcgaaaatctggaaaatgatttatggtttttcggaatcattagttctcaaatgtgcagttcaactagagatcgcagaaactattcataaccatggaaaaccaatgtctttgtctgaattagcttctaaacttcccgttcaacctgtcaattcagatcgtttattccgtattatgcgttacttggttcacatgaaattattcaagatagaagtttcttcacttaatggtggaagtgcctactcgttagctccaccaggaaaatatttgataagaggctggggaaaatcgatggttgcttcgattttagcaatgaatgataacgatttgttagctccatggcatcatttaaatgaaggtttgactggtaattgtaacgctttcgagaaagcgttgggaaagagcatttgggtttatatgagtgaaaatcctgaaaagaaccaactttttaatgaagcaatggcgtgcgatactgaattagttaattcagctttggttaatgaatgcaaaagtgtattctgtaatggaactaaaaccttagttgacgttggcggtggtattggtgctgctatgatggcaatttcggaagctttcccgagtattaagtgcacaatctttgatcttccgcatgttatcgctgaatctcctgaaatgccaaatattacgaaaatttcaggtgatatgttcgagtctattccaagtgctgatgccatctttatgaagaacatccttcatgattggaacgatgataagtgcattcaaattttaaagcgatgcaaagaagcactaccacgaggagggaaagttattatcgttgatatagtactggatgttgctgattcggttaatccattttcaaaaattagacttgcgtccgatttggatatgatgcttaacactggagggagagagagaactgaaaaagaattgaagaaacttattgatgcctcaggttttgctagctacaagattactcaaatgtctgcagttcaatctgtgatcgaggtttatccttaa

SEQ ID NO: 562 - DNA, 1092 bp, Papaver bracteatum
ctgaattcgactagcaaagaggagattgagctgatacaagctcacactcatatctggaagtatgtattcagctatgcaaattccatgtctctcaaatgtgttgttgaattaggcatacccgacataatccacagccatggaaaacccatgactctgtctagtcttgttgatgctctctttcttccatcagcgagaatcgatcctttgaataggttaatgcgctttatgattcattcgggattctttgaaacacgaagccttggcgaaaatcaagaacaacagggatatatactaacaccaacttcaaggcttttagtaaaagctaatcccaagacgatgtcatctgttgttctctctatggtcgatcctatcatggtatcatcttttcaatccttacacacttggtttcagggaagtgaatcctcaccatttgtggctgctcatggtatgagcctatggaatttgttggagcagaatcccgagtctggcaagaacttccatgattcgatggctaatgactcttgcgtgttgatgagtgtaattcttaatgaaggcaagggggtattcaataacttgaagtctctggttgatgtaggaggtgggactggaactacagctcatgccgttgttggagcattcccacacctcaactgcatggttctcgacctcccaaatgttgttgcagacttacaagggactgctaatgtagtcttcattgggggtgacatgttcgagtccatccctcatgcagatgcagtcttactcaagtttattcttcatgattggagcgacaaagattgtgttcgaatacttaagatgtgcagagaagctattccgtcaacagaagagggaggaaaggtgataataatagatgccgtgattgaagaagacaagaagaagaaacaagaagctaaagacgattcaataattactgaaactcaactactgtttgacattatgatgatggcttttgttaatggtaaagagagaactgagaaagaatggaaaaaacttttcatcgactcaggttttaccgactacaaaataactcgtgtccaggggtttaggtccttcattgaggtttatccttaa

SEQ ID NO: 563 - DNA, 1062 bp, Papaver bracteatum
atggatgctgaagaagaaataacgaaagggcaggccgaaatatgggagcatatgtttgcattcgcagattcaatggcgttgaaatgtgcagttgaacttggtataccggatattatcaactctcatggtcatccggtcacagtgtttgagatcatcaacagtttaaaaacaaccacatcatcatcatctcccaacatcgattatcttactcgtgtgatgagattgttggtccgcaaaagtatttttacttctcattttcatcaagaaaccaatcaaatcttgtatggtttaactccttcatccaaatggttattaagagattccaaatttaatctatcaccaacgatttcattttttcttcatccttcaatattgaaaccatggcaatatctaggaaattgtaccaaagaaaatggtcttgcttttcagaaagctcatgggtgtgaaatctgggatatggcggcagctgatcctcatttcaatcaagttttcaatgatggaatgggatgcacggctaagatgatagttagccagatgttgaccgaatataaagatggatttaactgtattggatcgcttgttgatgttggcggtgggaaaggggcgatgatagcagcaattgttgaggctaatccacacataacaggtatcaattttgatctacctcatgtactggctactgcacaagaacatccaggggtcacccatgttacaggtgatatgtttgttgagattccggaagctgatgctgttataatgaagtggataatgcatgactggagtgatgaaaattgcgtcaagatcttgaaaaattgttataaggcaatatcaaagacgaagaatggaaaggttataattgttgattgtgtattgcaaccagaaggaaatggattatttgatgaaacaggagtggcatttgatctactgatgatggtaatcccaggaggaaaagaaagaactgaagtcgaatggaacaacttactgaaaagtgcaggcttccctcgttataatcttatacaaattcccacaatccattctatcattgaggcattcccagaatga

SEQ ID NO: 564 - DNA, 1059 bp, Papaver bracteatum
atggatactgcagaagaaagattgaaagggcaagctgaaatatgggagcatatgtttgcatttgtagattcaatggcattgaaatgtgcagttgaacttggtatccctgatattataaactctcacggtcgtccgatcacaatgtctgagattatcgactacttaaaaacaaacacatcatctctcaacgtcgattatcttacacgtgtcatgcgattattggtgcataagcgtctatttacttctcaacttcaccaagaaaacaatcaaattgtctatggtttaactcggtcgtcaaaatggctactcaaagattctaagtttaatctttcaccgttggttttattcgaaactagtcctcaaccattaaaaccatggcaatatttgggcaaatgcgttcaagaaaatggtttaccttttgagagtgctcatggatgcgggatttgggatcttgctttagctgatcctaaattcaatggaaaattgaatggagcaatgcaatgtatgactatcctgataatcaacgagatgttgactgaatataaaggtggattcaacggaataagatcgattgttgatgtcggtggtggaaccgggacgttgctagctgagatagttggggctaatccacacatacaaggtatcaattttgatctaccacatgtagtgactacatgccctgatatcctaggggttaagcatcttggtggagatatgttcgttagtattccagaagctgatgctgtcatcatgaagtcgcttttgcatgactggactgacgaagactgcacaaaaatcttgaaaaattgttataaggcaataacaaataagaaaaacggaaaagttataatagttgaatttgtgctgcgaccagaaggaaatggcttatttgataaaacaggattgatcttagatatggtgatgttggcacatacttcaggtggcaaagaaagaactgaagtcgaatggaagatgttattaagtaatgccggttttcctcgttataatatccttcaaactcctgcatgtccttgtatcatcgaggcatttccagaataa

SEQ ID NO: 565 - DNA, 1068 bp, Papaver bracteatum
atggatattgaagaagaaagattgaaggggcaagcagaaatatgggagcatatgtttgcatttgcaaattcaatggcattgaaatgtgcaattgaacttggtatgcccgatatcataaactcttatggtcgtccagtcacaatgtccgagatcataaacagtttaaaaaaaaccacattatcatcatctcccaatgtggattatcttactcgtgtaatgagattgttggttcataaacgtatttttgcttctcaatttcatcaagaaagcaatcagattttatatgatttaactccatcatcaaaatggttactaagagattctaaatctactctagcaccaatgattttacttcaccttcatcctctctttttaaaaccatggcaatatgtgggaaaaagtgttgaagaaagtggttttccttttgagaaagctcatggatgtgatgcttgggatctggctttagctaatcctcactttaatcagcttttcaacgatgggatggaatgctcggctaagatagcagtcaacaagatgttagccaactataaaggaggatttaatggtataggagtgcttgttgatgttggtggggggaccgggtcgatgattgccggcatcgtgaaagcgaatccacatattagaggtgtcaatttcgatctacctcatgtagtggctacggcacctgaacatccagggatcacccatgttgggggtgatatgtttgctgatattccagaaggtgatgctattatcatgaagtggataatgcatgattggagcgatgaagactgcataaagatcttaagaaactgctacaaggcaatatccaagacaaagaatgggaaagttataattgttgactgtgtactgcaaccagatcacggaaatggcttatttgatgaagcgggattattattcgatctactgatgatggtaaatacttcgggtggaaaagaaagaaccgaagtcgaatggaacatgttattgaacagtgcaggtttcactcgttacaacataattcaaattcccacattcccttctatcatcgaggcctttccagaatga

SEQ ID NO: 566 - DNA, 1065 bp, Papaver bracteatum
atggatactgcagaagaaagattgaaagggcaagctgaaatatgggagcatatgtttgcatttgtggattcaatggcattaaaatgtgcagttgagcttggcatacccgatataataaactctcatggtcatcctgtcacaatatctgaaatcatcgacagtttaaagaaaagcacatcaacatctcccaacatcgattaccttacacgtataatgagactattggttcacaagaagctatttacttctcaatttcatcaagaaagtaaccaaattgtctatgatttaactcgatcatcaaaatggctactaaaagattccaagtttaatctgtcaccgttggttttatgggaaaataatccgatattattaaagccatggcaatatttgggcaagtgtgtccaagaaaatagttctccttttgagagagctcatggatgtgagatttgggatcttgctttagcggatcctaaatttaataatttcctgaatggtgcaatgcgatgttcgactacaacaataatcaacgagatgttgcttgaatataaagatggatttagtggtatagcaggatcgcttgttgatgtcggtggtggaactgggtcgataattgctgaaatagttgaggctaatccacacatacaaggcatcaatttcgatctaccacatgtagtggctacggcgcctgaatttccaggggtgaagcatgtcggtggtgatatgtttgtcgatattccggaagctgatgctgtcatcatgaagtggacattgcatgactggagtgacgaagactgcacaatcatactgaagaattgttaccaagcaataagaaagaagaaaaacgggaaagtcataattgttgattgtgtattgcgaccggatggaaatgacttatttgataaaatgggattgatatttgatgtgctgatgatggcacacactacagctggaaaagaaagaacagaagcggaatggaagatcttattaaataatgcaggttttccccgttacaatgtcattcgaactccggcattttcttgcatcatcgaggcctttccagaataa

SEQ ID NO: 567 - DNA, 1062 bp, Papaver bracteatum
atggatactgcagaagaaagattgaaagggcaaattgaaatatgggagcttacgggagcagttatagattcaatggcattgagatgtgcagttgaacttggtataccagatattataaactctcatggtcgtccaatcactatttcagagattatcaacagtttaaaatcaaccaaggcatctccgaacgcagaatatcttacacgtgtaatgagattattggttcacaaccgtgtattcacttctcaagtccaccaagaaagtaatcaaattgtatacaatttaactcgatcgtcaaaatggctactgaaagattctaagtttaatctatcacctacagttctatttgatactcatccaataatagtaaagccatggcaatatttgggcagatgtgttcaagaaaatggttttccttttgagagagctcatggacgtgagatttgggatcttgcttcagctgatcctaaatttaataatctcctgaatggtgcaatggggtgtacaagtacaacgataattaacgagatgttactcggatataaagatggatttagtggtataggatcgcttgttgatgtcggtggtgggaccgggacgataatagcggagattgttgaggctaatccacacataataggtaccaacttcgacctaccacatgtggtggctacagcgcctgattttccaggaattaagcatgttggtggtgatatgtttgttaacattcctgaagctgatgctgtcctcatgaagtggatattgcacgattggagtgacgaagactgcacaaaaatattgaagaattgttataaagcaataaccaagaagaaaaatgggaaagtgataattgttgaatgcgtattgcgaccagggggaactggcttatttgataaaatagggttgatatttgatatggggatgttggcacttacttcaggtggaaaagaaagaacggaagatgaatggaagatgctactaaataatgcaggttttccccgctataatatcattcaaactccttcatgtgcttactgtatcatcgtggcctttccagaataa

SEQ ID NO: 568 - DNA, 1062 bp, Papaver bracteatum
atggatgccgaagaagaaagattaaaagggcaggcagaaatattggagcatatgtttgcatttgtagattcaatggcactgaaatgtgtagttgaactaggtatacccgatattattaactctcacagtcgtccagtcacaatgtctgagatcatcgacaatttaaaaacaaacaatttatcatcacccaatgtcgattatcttacgcgtgtgatgcgattcttggtccataagggtctattttcttctcaatttcaccaagaaagtaatcaagacgtctacaatttaactcgatcgtcaaaatggctactaaaagattctaagtttgatctatcaccgtttgttatagtcgaaacgaatccaatattacaaaagccatggcaatacttgggtaaatgcgttcaagaaaatggtttaccttttgagagagcttatggatgtgggatttgggaccttgctttaattgatcctaaattcaataataattttaattgtgcaatgcaatgtatgactatgatgatgataaacgagatgttgatcgaacacaaagatagatttaatggtataggattgctggttgatgttggtggtgggaccgggacgatgatcgcggagatagttaaagctaatcctcatatgcaaggtatgaactttgatctgccacatgtggtggctacagcgcctgatttcccaggggttaaacatgttggtggtgacatgttcattgatattccggaagctgatgctgtcatcatgaagttggtattgcatgactggacagacgaagattgtagaaaaatcttgaaaaactgttataatgcaataacaaacaagaaagatggaaaagttataattgtcgaatatgtattgcgaccagaagaaagtggcttatttgataaaacaggattgatattagacatggtgatgatggttcatacttcaggtggaaaagaaagaaacgaagtagaatggaaggtgttattgaataatgcaggttttcctcgttgtaatattttccagtctcctgcgtatatttgtttcatcgaggcatttccagaataa

SEQ ID NO: 569 - DNA, 1020 bp, Papaver bracteatum
atggaagtagtaaataagattgatcaagaaaaccaagcaaaaatttggaaacaaatatatggttttgcagaatcattagttctgaaatgtgcagttcagttacagattgctgaaacacttcataataatgtaaaacccatgtctttatccgacttagcatctaaacttcccgttcaacctgttaatgaagaccgtttataccgaattctgcgttacttagttcacatgaaactcttcaacaaaaatgctaccactcaaagatattcattagctccaccagcaaagtatttgctaagaggctgggaaaaatcaatggttgcttcaatattaagcgttacggataaagattttacagctccatggaaacatcttagtgacggtttaactggtaactgtaacgcttttgagaaagcgttaggaaagagtattcgggtttacatgagtgaaaatcctgaaaaaaatcaattgtttaatgaaggaatggcttgtgatactggattgtttacctcagcaatggttaatgagtgcaaaaatatcctcagtgacggaatcaatacactagccctggttggcggtggtgctggtactgcagtgaaagccatatctaaagcttttccggaaactaaatgcacaatccatgatcttccacaaattctcagtaacattaataaaacttccagagatttgttcaagtccgttcctagtgccgacgccatctttatgaagagcatccttcacgagtggaacgatgaggaatgtattcaaatcctgaagcgatgcaaagaagcggtaccaaatgggggcaaagttattatcgcagatgtcgtactagacatggattcgactcatccgtattcaaaatcgagactcgcaatggatttggatatgatgctccacaccggtggaaaagagagaactgaagaagattggaagaagcttattgatgctgcaggttttgctagctgtaaaattactaatctatctgctctccaatctgttattgaggcttaccctcattga

SEQ ID NO: 570 - DNA, 1065 bp, Papaver bracteatum
atggaaatcaaactagaagatcaagaacaagaaatgaaaaaccaaggtcatgtttggaacataatctgtggtagtgttgattcatctgtacttaaatgtacagttgaattaggcattcttgatacaattcatcattcatccaaacccatgacactatcttccttatcatcagcatcaccatctttatctacactcaaagccgaaaatttgtacagattattgagatacttatctcatatgaatcttattgctattgattcaactgaaggaaatgagacattttctttgacaggtttatctaaattactacttaagaatcaagaaagaagtttgaaagattgggttctcggtatcgacgatgagcattcgattaatgggtggcatgagttaagtgattattgtttatcggctactgatgcaccgactccatttgtgaaattgtatgggaaaactttatgggaatttgctgcagaagttcctgaagttaatgagctaattaataatgccatggcttgtgatactaggatggtgatgcctgcatttgtgcaaggttgtgacagtatattgaagagtgttaagaagttagttgatattggtggaggcaccggagctgcgatgagttatgttgttaaggcttatcctgagataaaatgtatggcttttgatttgcctcatgttgttgctgctgcaccggaggttccaggcgtggaaatggttggtggagacatgtttgatatcattccctctgctgatgctcttttattgaagttcatgctgcataactggaaagacgccgaatgcataaaactgctaaaaaggtgtaaggaaacaattcctgaagataatgggaaagttatcataatagagatggttttggatcaagatgaagatgatgatgttttgacacaagctagattaagtcttgatctagatatgatgttgagttcaggagggaaagaaaggactaaggatgaatggagaattttacttgaagaagctggtttcaataagattgaattcattcctatttttgctattcaatcagtcattgttgcatatccttag

SEQ ID NO: 571 - DNA, 1122 bp, Papaver bracteatum
atggcaactttgtcttcgaagataacagggcctgaacgagtccttgatgaagggattcatttcgaaagccaagaacaagaaatgaaatatcaagctcaaatttggaaccacatgtgtggtgttgttgatacctcagttctgaaatgtgcaattgaattaggtatatttgatgccattcataactcaagtaaaccggcaattaccttaaccgaattatcaagcgttatttcaagttcaacaccatctgcatcttcaatcgaaccccgcaacttatatagattaatgagatacctatctcaaatgaatctcataagtacagaaaaatgctcggatgaagtaactgtttcgttgacagacacatctaagttactacttagaaaccaagagaagagtttgattgattgggttctgggaatttccagcgaaccgtgcgtgcttgtttggcacgaactaagcagctctctttcaacccctgcggatggacctccaagcttcgagaaggttcacggtaaaaattgttatgaattagctggagaaaatccagagtggaatgaactgattaacaatggtatgactagtgataccagtttaactatgccggcatttatacaaggatgtgatagaatcctcaaaggaattacatcgttaattgacgtcggtggtggtactggtgcctctatggcttacgtcgttaaagcttttcctcacataaaatgtggggtattcgacttaccacatgttgttgaggccgctccgcagtgtcccggtgttgagttcatcggtggtgatgtttttaaattccttcctaatgctgatgctcttttgttgaagtacaccctgcacaattgggaagatccagaatgtgtggatttgctgaagagatgtaaggaagtaattccggcagacaacggaaaggtgatcataatggatttagtaatagaccaagatgataacgatactttgatgcaggcgaggttgagccttgatctcgatgtgttgaaccatggaggtagagaaaggactaaagaagactggagaaatctaattgagatgtctggatttagtaggcatgaaataattccaatatttgcaatgccatcagtgattgttgcttatccttag

SEQ ID NO: 572 - DNA, 1077 bp, Papaver bracteatum
atggatatcaaattagaagatgaagaacaagaaataaaataccaaggtcatgtttggaacatgatctgcggtagtgttaactcatccgtacttaaatgtacgattgttttaggtcttttcgatacaattcataattcatccaaacccatgacactatcctccctatcatcagcatcaccatctttatctcctctcaaaaccgaaaagttatatagactattaagatacttatctcatatgaatctcatcgccatcaattcagttcaaggaagtgatgatacattttcattaacagatacatctaagttactacttagtaatcaagaaagaagtttgaaggattgggttctcggtatcgacgatccactcgcaattaacgggtggcatgagttaagtgattattgtttatcccccgttgatgcgccggttccttttgtaaagatgcacgggaaaaccatgtgggagtttgctgcagaaattcccgaagttaatgagctattcaataactccatggcttgtgatactaaactagtaatgcctgcatttttgcaaggttgccatagtatcttcaataaaggtactgtaaaaaagatggttgacatcggtggtggtacaggtgctgctatgagttatgttgttaaggcttttcccgacataaaatgtatggtttttgatttgcctcatgttgttgctaacgcaccggagattcaaggtgtggaattggtgggtggtgatatgtttgaatttatccctcctgctgatgctcttttgttgaagttcattctccataactgggatgatgtcggatgcataaagctactaaagaagtgtaaggagacaatttcagctgatcatgggaaagttatcataatagaaatggttttggaagaagacgaccatgacaatgatgctttgacacaagcaagattgagtcttgatttagatatgatggtatgttcaggaggaagagaaaggactaaagatgaatggacaactttagtggaacaggctggtttcagcaagattgaattctttcctatttttgccattcaatcagttattgttgcatatccataa

SEQ ID NO: 573 - DNA, 1074 bp, Papaver bracteatum
atggaaattcaaatggaagatgaacaactagaaatgaaatatcaatctcaaatatggaatcacgtatgtggtagtgttaatacatcagttcttaaatgttcaattagtttaggcatttttgatgtcattcatgattcaggtaagtccatgttgactttaactgagttatcaaattcattatcatcttcaaacatgatcaaaacccacaacttatatagacttcttagatacttgagtcatatgaatcttattgccatcagttcgatccaaggaaatgatcatttttctttaactgatttatctaagttactacttggaaatcaagaaaagagtttaaaggattgggccatagggattggtgatgtaaattttgtggcaacttggcatgaaatgagtagctcttgttccaaactcccaggtgacctcacggcttgggaaacagtacatggtaaagagggttacgagttaaatgtggaggatccagaatttagtgaaaggtttgataaggctatgtcaagtgatactacattagctatgcctgcatttatccaaggttgtgatataattatgagtggaattagttcattagttgatgtcgggggtggaatcggtaccgctatgacttatgttgtcaaggcatttcctcatataaaatgtactgtttttgatgtaccccatgtgattcatacagcggcggatccagcaaagtgtcatggtattgagttcattggtggtgatcttttcagcttcatccctcctgctgatgctattttgttaaagttcatgttacacaattgggaagatgaagaatgcaaaaatatattgaaaagatgcaaagaggcaattccggcggacaaaggtaaggtgatcataatggatatagtgttggatgaaaacgcagataatgatgatttagtacaagccaagttgagcatggatcttgatatgatgagttcaggaggtcgagaaaggactaaagaagattggaaaaacctgctcgagatgtccgggtttacaagccatgaaatcattcccattctcgccatacagtccatcattgttgcatatccttga

SEQ ID NO: 574 - DNA, 1014 bp, Papaver bracteatum
atgatgagcattcgattcagattattgagatacttatctcatatgaatcttattgcaatgaatgcaattgaaggaaatgagacattttctttaacaggtatatctaaattactacttaagaatcaagaaagaagtttgaaagattgggttctcggtatcgacgatgagcattcgattaatgggtggcatgagttaagtgattattgtttatcggctactgatgcaccgactccatttgtgaaattgtatgggaaaactttatgggaatttgctgcagaagttcctgaagttaatgagctaattaataatgccatggcttgtgatactaggatggtgatgcctgcatttgtgcaaggttgtgacagtatattgaagagtgttaagaagttagttgatattggtggaggcaccggagctgcgatgagttatgttgttaaggcttatcctgagataaaatgtatggcttttgatttgcctcatgttgttgctgctgcaccggaggttccaggtgtggaaatggttggtggtgatatgtttgaattcattccccctgctgatgctcttttattgaagttcatgctgcataactggaaagacgccgaatgcataagtatggcttttgatttgcctcatgttgttgctgctgcaccggagattccaggtgtggaaatggttggtggagacatgtttgatttcattccctctgctgatgctcttttattgaagttcatgctgcataactggaaagacgccgaatgcataaaactgctaaagaggtgcaaggaaacaattcctgaagataatgggaaagttatcataatagaaatggttttggatcaagatgaagatgatgatgatttgacacaagctagattgagtcttgatctagatatgatgttgagttcaggagggaaagaaaggactaaagatgaatggagaattttacttgaagaggctggtttcaataagattgaattcattcctatttttgcaattcagtcggttattgtggca

SEQ ID NO: 575 - DNA, 1173 bp, Papaver bracteatum
atggctaccaatggcgaaattttcgatacctatggtcataatcatcaaacagccacagtcactaaaatcactgcttctgatgacagcagtaatgatgtctgttatctttcagaaacggctaacttagggaagttaatatgcattccaatggcattaagagctgcgatggagctaaatgtgttccaacttatctcaaagtttggaactgacgcaaaagtttcggcttctgaaattgcctctaaaatgccaaacacgacgagtaacccaacagcagctatctatttagatagagttcttcgactgctcggtgccagttctattctttccgtttctaccagaaaaaaattaatcaacggaggaggagaagatagagtagtacatgagaaggtgtacgggctaacgaattcgtcgtgctgtttggtccctcgagaagaagacggggtgtcattagtcgaagaattgctattcacatctgacaaggttgttgtggatagttttttcaaactgaaatgtgtggtggaagaaaaagacagtgtgccatttgaggttgctcatggtgctaagatctttgagtatgctgctacagaaccaagaatgaataaggtttttaacgatggaatggcagttttctctattgttgtttttgaagctgtttttagagtttacgatggatttcttgacatgaaagaattgttagatgttggtggtggtattggtacttcagttagtaaaattgttgctaaataccctttcattcgcggtgtcaacttcgacttgcctcatgttatttctgttgcccctcaatacccaggggtagagcatgttgcaggagacatgttcgaggaagttccaaagggtcaaaacatgttgctaaaatgggtactgcacgattggggtgacgaacgatgtgtgaagctgttaaagaattgttggaagtcattacctgcgggtggaaaagttttgataatcgagtttgttcttccgaatgaacttggtaataatgccgaatcattcaatgcgttgattcccgatttactcctgatggctctgaatccaggcggtaaagaacgaacaatttcggaatatgatgatttagccaaagcagctggatttataaaaactatacctatccctatctccaatggtcttcatgtcattgagtttcacaaatga

SEQ ID NO: 576 - DNA, 1167 bp, Papaver bracteatum
atgactatggaaattgatcatggtgaagaacatgatacatcagcatcatctactactaacctcggtgatgatgtatcttatctttctgataatgcaaatttaggtaagctcatatgcattccaatggcactaagagctgcgatggagctaaacgtgttccagctcatctcaaaattcgggcttgatgcaaaggtttcggcttctcaactagtctcaaaaatgccgaacgcacccaataatcctaatgcagcaatgtatttagataggattctccgtttacttggggcaagttccattctttcagtttctaatagcatggaaagtggtggtcactgtgttaatcagaataatggagaagctggagcagtagcaatggagagagtgtatggattaacgagggcatcgtattgtttagtgcctcgagaagaagacggagtttcgctagtaccactcttggtgttacaatctgataaggtcatagttgatagtttttttaaattgaaagagatggttatggagaaagatgttgtgccatttgatgctgctcatggtattagcatcttcgagtatgcttgcaaagagccaagattgaataaggcttttaatgagggaatgggagctttctctgctgttgtttttgaagctgtttttaagtactatgatgggttttctgggatgaaagaattgttagatgttggtggtgggatcggtacttccgttagtaagattgtcgcgaaataccattccattcgtggtatcaactttgacttgcctcatgttatttctgttgctcctcaatacccaggtgtggagcatgttcaaggagatatgttcgaacaagttccaaaggctcaaaacatgttgctaaaatggatacttcacgattatgacgatgaacattgtgtgaagttgttaaagaactgctggaactcgttacaagtgggtggaagagttatgataattgagtttgctgttcctaacaaacttgtcaatagtgcagaaacgttcaatccgttgaattctgatttaatgatgatggctgtgaatccaggcggtaaagaacgaacaatgtttgaatttaataatttggccagtgcatctgggtttgcgaaaactgtacatttcttgatctccgaatcacttcacctcattgagtttcataaatga

SEQ ID NO: 577 - DNA, 1122 bp, Papaver bracteatum
atgagttattcgatacccattcatgttaatgaactaaaccatcaagatttagaagaaaatgatgatcaactctgtattttagcatgtcaaattgcagcttgctcaggacttccgatggctttaaaagctgcattagatcttgatttactcgaaaccatagctaaagcgggtccaaatgcatacatctccccattagagatttcatccaagttaggtactcaaaatcccaatgcaccttccatgttagataggcttttgcgtttgttaacaagcttttctatcctcaaatgctcacaaatcactacccaagatggcaagattcaacgactgtatgggttagcacctgtttgcaagtattttactagggatccagaaaatggtgtctctgttgctcctttagctgtgatgaatacagacagggtcttcatagatagttggtatcactttaaagatgctgtaatggaaggtggaattcctttcaatagagctcatgggatgagtgcatttgaataccccgggctagatcttagattcaatcaagtttttaataaagctatgtcagatcacactaccttgactatgacaaaagtacttgaaaaatacaaaggatttgaaggtattaaagtgttggttgatgttggtggtggtgttggagtcacaactaaaatgattactgccaagtatcctcaacttaagggtatcaatttcgacttgcctcatgtattagcagatgcaacaacatatcccggagtggagaatgttggaggagacatgtttgtcagtgtcccaagaggggatgccattttcatgaagtggattcttcacgattggagtgatgagtattgcttgaaactcttaaaaaactgttatgaagctctaccagactgcggaaaagtgatcattattgaagcgaatcttcctgcagtcattgatgatagtgttacctcaaaacttttgtttgaacaagatatggtcatgttaactcagaaccctggaggtaaagaaaggacattttcagaatttgaagacctggcaaagcaatctggatttgctagctgtgagactctatgttctgtttactacagttacgttatggagttccataaaacagctaggatttag

SEQ ID NO: 578 - DNA, 1128 bp, Papaver bracteatum
atgggttcaggccatcacagcaaacacaaaggtgatcatcatgaagaagagcattccaaagataaaaaagaagaacaagcatgtatgtttgcattacaattggctagtgcatcagtaccagtgatggtattaagagctgcaattgaaatggatgttttggaaataatgaacagagctggtccaggttctgaacttagtgctgcatatattgcatcacagattctcaatgttaccaacccgaatgctagtattatgcttgatcgtatgttgagattattggctagttataagattcttacttgttctgacagaactcttgacgatggcacaactgagagagtctatggtcttgaacttgtttgcaagtttcttgtcaaggatgatgatggtgtttcaatggctcctttgcttttgatgaaccaagataagatcttattggagagctggttccatttgaaagacgcggttgtgaccggcggtatcccatttaacctggcatacggcatgaacgcattcgaatacccagcaacagatgcaaggttcaacacggtgttcaacaaaggaatgtcagatcacactgcaattttcatgaaaaagattttagaaacatacaaaggtttcgaaggtataaattccatcgttgatgttggtggaggcgtcggtgtcagtctagacatgattcttaccaagtacccatccatgaaaggtattaacttcgatttaccacacgtaatcaaagacgcgccagcttacgaatccgcagtcgaacatgttggaggagatatgtttgtgagtgttccaaaagggactgatgctgtattcatgaaatggattcttcatgactggagtgacgagttttgcacaaaagttttgaagaatattcatgatgctttacctgaacatggtaaattgatactagtggaatgcattattccaccaacatgtgaaccaactcttgaagctttaggtgtttaccatgttgataatatgatgatggcttacaaccctggtggcaaagaaaggactgagaaagagtttgatgctttggctaaagcaactggattttctggtgttaagcttatctgttctgcttttaacacttggattatggagtgccacaagaactaa

SEQ ID NO: 579 - protein, 353 aa, Papaver bracteatum
MGSQATETQVVSLEDQAQIWNIIYGFADSLVLRCAVQIGIPDIIKNNKGSITLAQLSSKLPIPDVNSGHLQRIIRYLVQLDILQQETCNGGAEMVYSLKPAGTLLLRDAKISMVPMLLGLTQKDFMVPWHFIKEVLGNGSATAFEIGMGKTMWQYLADNPEQSQLFDEGMAGDITLLSKTLTEDCSDIFQGLDSLVDVGGGNGAAIMAIYEAFPHIKCTLFDLPHVIASSHNHPKIEKIPGDMFKSVPSAQALLLKSILHDWTDEECVKILKNCKEAIPKETGKVIIVDIALEEESTHPLAKKRLVLDIDMLVNTGGRERTADDWENLLKSAGFRSHKISPIRAMQSVIEAFP

SEQ ID NO: 580 - protein, 346 aa, Papaver bracteatum
METVSKIDQQNQAKIWKQIYGFAESLVLKCAVQLEIAETLHNNVKPMSLSELASKLPVAQPVNEDRLFRIMRYLVHMELFKIDATTQKYSLAPPAKYLLRGWEKSMVDSILCINDKDFLAPWHHLGDGLTGNCDAFEKALGKSIWVYMSENPEKNQLFNAAMACDTRLVTSALANECKSIFSDGIRTLVDVGGGTGTAVKTISKAFPDIKCTIYDLPHVIADSPEIPNITKISGDMFKSIPSADAIFMKCILHDWNDEECIQILKRCKEALPKDGKVIIVDVVIDMDSTHPYAKIRLTLDLDMMLNTGGKERTKEEWKILFDAAGFASHKVTQISAVQSVIEAYPY

SEQ ID NO: 581 - protein, 349 aa, Papaver bracteatum
MEVVYKIDQENQAKIWKMIYGFSESLVLKCAVQLEIAETIHNHGKPMSLSELASKLPVQPVNSDRLFRIMRYLVHMKLFKIEVSSLNGGSAYSLAPPGKYLIRGWGKSMVASILAMNDNDLLAPWHHLNEGLTGNCNAFEKALGKSIWVYMSENPEKNQLFNEAMACDTELVNSALVNECKSVFCNGTKTLVDVGGGIGAAMMAISEAFPSIKCTIFDLPHVIAESPEMPNITKISGDMFESIPSADAIFMKNILHDWNDDKCIQILKRCKEALPRGGKVIIVDIVLDVADSVNPFSKIRLASDLDMMLNTGGRERTEKELKKLIDASGFASYKITQMSAVQSVIEVYP

SEQ ID NO: 582 - protein, 363 aa, Papaver bracteatum
LNSTSKEEIELIQAHTHIWKYVFSYANSMSLKCVVELGIPDIIHSHGKPMTLSSLVDALFLPSARIDPLNRLMRFMIHSGFFETRSLGENQEQQGYILTPTSRLLVKANPKTMSSVVLSMVDPIMVSSFQSLHTWFQGSESSPFVAAHGMSLWNLLEQNPESGKNFHDSMANDSCVLMSVILNEGKGVFNNLKSLVDVGGGTGTTAHAVVGAFPHLNCMVLDLPNVVADLQGTANVVFIGGDMFESIPHADAVLLKFILHDWSDKDCVRILKMCREAIPSTEEGGKVIIIDAVIEEDKKKKQEAKDDSIITETQLLFDIMMMAFVNGKERTEKEWKKLFIDSGFTDYKITRVQGFRSFIEVYP

SEQ ID NO: 583 - protein, 353 aa, Papaver bracteatum
MDAEEEITKGQAEIWEHMFAFADSMALKCAVELGIPDIINSHGHPVTVFEIINSLKTTTSSSSPNIDYLTRVMRLLVRKSIFTSHFHQETNQILYGLTPSSKWLLRDSKFNLSPTISFFLHPSILKPWQYLGNCTKENGLAFQKAHGCEIWDMAAADPHFNQVFNDGMGCTAKMIVSQMLTEYKDGFNCIGSLVDVGGGKGAMIAAIVEANPHITGINFDLPHVLATAQEHPGVTHVTGDMFVEIPEADAVIMKWIMHDWSDENCVKILKNCYKAISKTKNGKVIIVDCVLQPEGNGLFDETGVAFDLLMMVIPGGKERTEVEWNNLLKSAGFPRYNLIQIPTIHSIIEAFPE

SEQ ID NO: 584 - protein, 352 aa, Papaver bracteatum
MDTAEERLKGQAEIWEHMFAFVDSMALKCAVELGIPDIINSHGRPITMSEIIDYLKTNTSSLNVDYLTRVMRLLVHKRLFTSQLHQENNQIVYGLTRSSKWLLKDSKFNLSPLVLFETSPQPLKPWQYLGKCVQENGLPFESAHGCGIWDLALADPKFNGKLNGAMQCMTILIINEMLTEYKGGFNGIRSIVDVGGGTGTLLAEIVGANPHIQGINFDLPHVVTTCPDILGVKHLGGDMFVSIPEADAVIMKSLLHDWTDEDCTKILKNCYKAITNKKNGKVIIVEFVLRPEGNGLFDKTGLILDMVMLAHTSGGKERTEVEWKMLLSNAGFPRYNILQTPACPCIIEAFPE

SEQ ID NO: 585 - protein, 355 aa, Papaver bracteatum
MDIEEERLKGQAEIWEHMFAFANSMALKCAIELGMPDIINSYGRPVTMSEIINSLKKTTLSSSPNVDYLTRVMRLLVHKRIFASQFHQESNQILYDLTPSSKWLLRDSKSTLAPMILLHLHPLFLKPWQYVGKSVEESGFPFEKAHGCDAWDLALANPHFNQLFNDGMECSAKIAVNKMLANYKGGFNGIGVLVDVGGGTGSMIAGIVKANPHIRGVNFDLPHVVATAPEHPGITHVGGDMFADIPEGDAIIMKWIMHDWSDEDCIKILRNCYKAISKTKNGKVIIVDCVLQPDHGNGLFDEAGLLFDLLMMVNTSGGKERTEVEWNMLLNSAGFTRYNIIQIPTFPSIIEAFPE

SEQ ID NO: 586 - protein, 354 aa, Papaver bracteatum
MDTAEERLKGQAEIWEHMFAFVDSMALKCAVELGIPDIINSHGHPVTISEIIDSLKKSTSTSPNIDYLTRIMRLLVHKKLFTSQFHQESNQIVYDLTRSSKWLLKDSKFNLSPLVLWENNPILLKPWQYLGKCVQENSSPFERAHGCEIWDLALADPKFNNFLNGAMRCSTTTIINEMLLEYKDGFSGIAGSLVDVGGGTGSIIAEIVEANPHIQGINFDLPHVVATAPEFPGVKHVGGDMFVDIPEADAVIMKWTLHDWSDEDCTIILKNCYQAIRKKKNGKVIIVDCVLRPDGNDLFDKMGLIFDVLMMAHTTAGKERTEAEWKILLNNAGFPRYNVIRTPAFSCIIEAFPE

SEQ ID NO: 587 - protein, 353 aa, Papaver bracteatum
MDTAEERLKGQIEIWELTGAVIDSMALRCAVELGIPDIINSHGRPITISEIINSLKSTKASPNAEYLTRVMRLLVHNRVFTSQVHQESNQIVYNLTRSSKWLLKDSKFNLSPTVLFDTHPIIVKPWQYLGRCVQENGFPFERAHGREIWDLASADPKFNNLLNGAMGCTSTTIINEMLLGYKDGFSGIGSLVDVGGGTGTIIAEIVEANPHIIGTNFDLPHVVATAPDFPGIKHVGGDMFVNIPEADAVLMKWILHDWSDEDCTKILKNCYKAITKKKNGKVIIVECVLRPGGTGLFDKIGLIFDMGMLALTSGGKERTEDEWKMLLNNAGFPRYNIIQTPSCAYCIIVAFPE

SEQ ID NO: 588 - protein, 353 aa, Papaver bracteatum
MDAEEERLKGQAEILEHMFAFVDSMALKCVVELGIPDIINSHSRPVTMSEIIDNLKTNNLSSPNVDYLTRVMRFLVHKGLFSSQFHQESNQDVYNLTRSSKWLLKDSKFDLSPFVIVETNPILQKPWQYLGKCVQENGLPFERAYGCGIWDLALIDPKFNNNFNCAMQCMTMMMINEMLIEHKDRFNGIGLLVDVGGGTGTMIAEIVKANPHMQGMNFDLPHVVATAPDFPGVKHVGGDMFIDIPEADAVIMKLVLHDWTDEDCRKILKNCYNAITNKKDGKVIIVEYVLRPEESGLFDKTGLILDMVMMVHTSGGKERNEVEWKVLLNNAGFPRCNIFQSPAYICFIEAFPE

SEQ ID NO: 589 - protein, 339 aa, Papaver bracteatum
MEVVNKIDQENQAKIWKQIYGFAESLVLKCAVQLQIAETLHNNVKPMSLSDLASKLPVQPVNEDRLYRILRYLVHMKLFNKNATTQRYSLAPPAKYLLRGWEKSMVASILSVTDKDFTAPWKHLSDGLTGNCNAFEKALGKSIRVYMSENPEKNQLFNEGMACDTGLFTSAMVNECKNILSDGINTLALVGGGAGTAVKAISKAFPETKCTIHDLPQILSNINKTSRDLFKSVPSADAIFMKSILHEWNDEECIQILKRCKEAVPNGGKVIIADVVLDMDSTHPYSKSRLAMDLDMMLHTGGKERTEEDWKKLIDAAGFASCKITNLSALQSVIEAYPH

SEQ ID NO: 590 - protein, 354 aa, Papaver bracteatum
MEIKLEDQEQEMKNQGHVWNIICGSVDSSVLKCTVELGILDTIHHSSKPMTLSSLSSASPSLSTLKAENLYRLLRYLSHMNLIAIDSTEGNETFSLTGLSKLLLKNQERSLKDWVLGIDDEHSINGWHELSDYCLSATDAPTPFVKLYGKTLWEFAAEVPEVNELINNAMACDTRMVMPAFVQGCDSILKSVKKLVDIGGGTGAAMSYVVKAYPEIKCMAFDLPHVVAAAPEVPGVEMVGGDMFDIIPSADALLLKFMLHNWKDAECIKLLKRCKETIPEDNGKVIIIEMVLDQDEDDDVLTQARLSLDLDMMLSSGGKERTKDEWRILLEEAGFNKIEFIPIFAIQSVIVAYP

SEQ ID NO: 591 - protein, 373 aa, Papaver bracteatum
MATLSSKITGPERVLDEGIHFESQEQEMKYQAQIWNHMCGVVDTSVLKCAIELGIFDAIHNSSKPAITLTELSSVISSSTPSASSIEPRNLYRLMRYLSQMNLISTEKCSDEVTVSLTDTSKLLLRNQEKSLIDWVLGISSEPCVLVWHELSSSLSTPADGPPSFEKVHGKNCYELAGENPEWNELINNGMTSDTSLTMPAFIQGCDRILKGITSLIDVGGGTGASMAYVVKAFPHIKCGVFDLPHVVEAAPQCPGVEFIGGDVFKFLPNADALLLKYTLHNWEDPECVDLLKRCKEVIPADNGKVIIMDLVIDQDDNDTLMQARLSLDLDVLNHGGRERTKEDWRNLIEMSGFSRHEIIPIFAMPSVIVAYP

SEQ ID NO: 592 - protein, 358 aa, Papaver bracteatum
MDIKLEDEEQEIKYQGHVWNMICGSVNSSVLKCTIVLGLFDTIHNSSKPMTLSSLSSASPSLSPLKTEKLYRLLRYLSHMNLIAINSVQGSDDTFSLTDTSKLLLSNQERSLKDWVLGIDDPLAINGWHELSDYCLSPVDAPVPFVKMHGKTMWEFAAEIPEVNELFNNSMACDTKLVMPAFLQGCHSIFNKGTVKKMVDIGGGTGAAMSYVVKAFPDIKCMVFDLPHVVANAPEIQGVELVGGDMFEFIPPADALLLKFILHNWDDVGCIKLLKKCKETISADHGKVIIIEMVLEEDDHDNDALTQARLSLDLDMMVCSGGRERTKDEWTTLVEQAGFSKIEFFPIFAIQSVIVAYP

SEQ ID NO: 593 - protein, 357 aa, Papaver bracteatum
MEIQMEDEQLEMKYQSQIWNHVCGSVNTSVLKCSISLGIFDVIHDSGKSMLTLTELSNSLSSSNMIKTHNLYRLLRYLSHMNLIAISSIQGNDHFSLTDLSKLLLGNQEKSLKDWAIGIGDVNFVATWHEMSSSCSKLPGDLTAWETVHGKEGYELNVEDPEFSERFDKAMSSDTTLAMPAFIQGCDIIMSGISSLVDVGGGIGTAMTYVVKAFPHIKCTVFDVPHVIHTAADPAKCHGIEFIGGDLFSFIPPADAILLKFMLHNWEDEECKNILKRCKEAIPADKGKVIIMDIVLDENADNDDLVQAKLSMDLDMMSSGGRERTKEDWKNLLEMSGFTSHEIIPILAIQSIIVAYP

SEQ ID NO: 594 - protein, 338 aa, Papaver bracteatum
MMSIRFRLLRYLSHMNLIAMNAIEGNETFSLTGISKLLLKNQERSLKDWVLGIDDEHSINGWHELSDYCLSATDAPTPFVKLYGKTLWEFAAEVPEVNELINNAMACDTRMVMPAFVQGCDSILKSVKKLVDIGGGTGAAMSYVVKAYPEIKCMAFDLPHVVAAAPEVPGVEMVGGDMFEFIPPADALLLKFMLHNWKDAECISMAFDLPHVVAAAPEIPGVEMVGGDMFDFIPSADALLLKFMLHNWKDAECIKLLKRCKETIPEDNGKVIIIEMVLDQDEDDDDLTQARLSLDLDMMLSSGGKERTKDEWRILLEEAGFNKIEFIPIFAIQSVIVA

SEQ ID NO: 595 - protein, 390 aa, Papaver bracteatum
MATNGEIFDTYGHNHQTATVTKITASDDSSNDVCYLSETANLGKLICIPMALRAAMELNVFQLISKFGTDAKVSASEIASKMPNTTSNPTAAIYLDRVLRLLGASSILSVSTRKKLINGGGEDRVVHEKVYGLTNSSCCLVPREEDGVSLVEELLFTSDKVVVDSFFKLKCVVEEKDSVPFEVAHGAKIFEYAATEPRMNKVFNDGMAVFSIVVFEAVFRVYDGFLDMKELLDVGGGIGTSVSKIVAKYPFIRGVNFDLPHVISVAPQYPGVEHVAGDMFEEVPKGQNMLLKWVLHDWGDERCVKLLKNCWKSLPAGGKVLIIEFVLPNELGNNAESFNALIPDLLLMALNPGGKERTISEYDDLAKAAGFIKTIPIPISNGLHVIEFHK

SEQ ID NO: 596 - protein, 388 aa, Papaver bracteatum
MTMEIDHGEEHDTSASSTTNLGDDVSYLSDNANLGKLICIPMALRAAMELNVFQLISKFGLDAKVSASQLVSKMPNAPNNPNAAMYLDRILRLLGASSILSVSNSMESGGHCVNQNNGEAGAVAMERVYGLTRASYCLVPREEDGVSLVPLLVLQSDKVIVDSFFKLKEMVMEKDVVPFDAAHGISIFEYACKEPRLNKAFNEGMGAFSAVVFEAVFKYYDGFSGMKELLDVGGGIGTSVSKIVAKYHSIRGINFDLPHVISVAPQYPGVEHVQGDMFEQVPKAQNMLLKWILHDYDDEHCVKLLKNCWNSLQVGGRVMIIEFAVPNKLVNSAETFNPLNSDLMMMAVNPGGKERTMFEFNNLASASGFAKTVHFLISESLHLIEFHK

SEQ ID NO: 597 - protein, 373 aa, Papaver bracteatum
MSYSIPIHVNELNHQDLEENDDQLCILACQIAACSGLPMALKAALDLDLLETIAKAGPNAYISPLEISSKLGTQNPNAPSMLDRLLRLLTSFSILKCSQITTQDGKIQRLYGLAPVCKYFTRDPENGVSVAPLAVMNTDRVFIDSWYHFKDAVMEGGIPFNRAHGMSAFEYPGLDLRFNQVFNKAMSDHTTLTMTKVLEKYKGFEGIKVLVDVGGGVGVTTKMITAKYPQLKGINFDLPHVLADATTYPGVENVGGDMFVSVPRGDAIFMKWILHDWSDEYCLKLLKNCYEALPDCGKVIIIEANLPAVIDDSVTSKLLFEQDMVMLTQNPGGKERTFSEFEDLAKQSGFASCETLCSVYYSYVMEFHKTARI

SEQ ID NO: 598 - protein, 375 aa, Papaver bracteatum
MGSGHHSKHKGDHHEEEHSKDKKEEQACMFALQLASASVPVMVLRAAIEMDVLEIMNRAGPGSELSAAYIASQILNVTNPNASIMLDRMLRLLASYKILTCSDRTLDDGTTERVYGLELVCKFLVKDDDGVSMAPLLLMNQDKILLESWFHLKDAVVTGGIPFNLAYGMNAFEYPATDARFNTVFNKGMSDHTAIFMKKILETYKGFEGINSIVDVGGGVGVSLDMILTKYPSMKGINFDLPHVIKDAPAYESAVEHVGGDMFVSVPKGTDAVFMKWILHDWSDEFCTKVLKNIHDALPEHGKLILVECIIPPTCEPTLEALGVYHVDNMMMAYNPGGKERTEKEFDALAKATGFSGVKLICSAFNTWIMECHKN
